(19) United States
(12) Patent Application Publication
(10) Pub. No.: US 2025/0092375 A1
(43) Pub. Date: Mar. 20, 2025

(54) CAS ENDONUCLEASES AND RELATED METHODS

(71) Applicant: Flagship Pioneering Innovations VII, LLC, Cambridge, MA (US)

(72) Inventors: Molly Krisann GIBSON, Medford, MA (US); Pengfei TIAN, Boston, MA (US); Iain James MCFADYEN, Arlington, MA (US); Athanasios Dimitri DOUSIS, Somerville, MA (US); Jeffrey Ian BOUCHER, Cambridge, MA (US); Panagiota KYRIAKOU, Cambridge, MA (US); Pradeep RAMESH, Washington, DC (US)

(21) Appl. No.: 18/782,204

(22) Filed: Jul. 24, 2024

Related U.S. Application Data
(60) Provisional application No. 63/515,768, filed on Jul. 26, 2023.

(30) Foreign Application Priority Data
Jul. 25, 2023 (GR) 20230100610

(51) Int. Cl. C12N 9/22; C12N 15/11; C12N 15/90

(52) U.S. Cl. CPC C12N 9/22; C12N 15/11; C12N 15/907; C12N 2310/20

(57) ABSTRACT

Provided herein are Cas endonucleases (and functional fragments, functional variants, and domains thereof), nucleic acid molecules encoding the same, and systems comprising the same. The disclosure further relates to methods of utilizing the Cas endonucleases (or nucleic acid molecules encoding the same), including, e.g., in methods of editing a nucleic acid molecule (e.g., a gene) and methods of treating diseases (e.g., genetic diseases).

### RELATED APPLICATIONS

[0001] This application claims priority to Greek Patent Application No. 20230100610, filed Jul. 25, 2023; and U.S. Ser. No. 63/515,768, filed Jul. 26, 2023, the entire contents of each of which is incorporated herein by reference.

### SEQUENCE LISTING

[0002] The instant application contains a Sequence Listing which has been submitted electronically in XML format and is hereby incorporated by reference in its entirety. Said XML copy, created on Dec. 3, 2024, is named 62801_25US01_SL.xml and is 1,126,243 bytes in size.

### 1. FIELD

[0003] This disclosure relates to Cas endonucleases (and functional fragments, functional variants, and domains thereof), nucleic acid molecules encoding the same, and systems comprising the same. The disclosure further relates to methods of utilizing the Cas endonucleases (or nucleic acid molecules encoding the same), including, e.g., in methods of editing a nucleic acid molecule (e.g., a gene) and methods of treating diseases (e.g., genetic diseases).

### 2. BACKGROUND

[0004] CRISPR (clustered regularly interspaced short palindromic repeats)-Cas (CRISPR-associated protein) systems are adaptive immune systems of many prokaryotes (e.g., bacteria and archaea) that function to prevent infection (e.g., by phages, viruses, and other foreign genetic elements). Typical naturally occurring CRISPR-Cas systems comprise a CRISPR RNA (crRNA), a trans-activating CRISPR RNA (tracrRNA), and a Cas endonuclease, wherein the tracrRNA mediates binding to the Cas endonuclease, the crRNA directs the Cas endonuclease to a target nucleic acid molecule, and the Cas endonuclease mediates cleavage of the target nucleic acid molecule (e.g., viral DNA). CRISPR-Cas systems have been adapted and modified for nucleic acid (e.g., gene) editing in e.g., eukaryotic cells.

### 3. SUMMARY

[0005] Provided herein are, inter alia, novel Cas endonucleases and polynucleotides encoding the same; fusions and conjugates comprising a Cas endonuclease; methods of manufacturing; pharmaceutical compositions; and methods of use including, e.g., methods of editing a nucleic acid molecule (e.g., a gene) and methods of treating diseases (e.g., genetic diseases).

[0006] Accordingly, in one aspect provided herein are Cas endonucleases (or functional fragments, functional variants, or domains thereof) that comprises an amino acid sequence is at least 80%, 81%, 82% 83%, 84%, 85%, 86%, 87%, 88%, 89%, 90%, 91%, 92%, 93%, 94%, 95%, 96%, 97%, 98%, 99%, or 100% identical to the amino acid sequence of any Cas endonuclease set forth in Table 1 or set forth in any one of SEQ ID NOS: 1-320.

[0007] In some embodiments, the amino acid sequence is at least 85%, 86%, 87%, 88%, 89%, 90%, 91%, 92%, 93%, 94%, 95%, 96%, 97%, 98%, 99%, or 100% identical to the amino acid sequence of any Cas endonuclease set forth in Table 1 or set forth in any one of SEQ ID NOS: 1-320. In some embodiments, the amino acid sequence is at least 90%, 91%, 92%, 93%, 94%, 95%, 96%, 97%, 98%, 99%, or 100% identical to the amino acid sequence of any Cas endonuclease set forth in Table 1 or set forth in any one of SEQ ID NOS: 1-320.

[0008] In some embodiments, the amino acid sequence of the Cas endonuclease is less than 90%, 89%, 88%, 87%, 86%, 85%, 84%, 83%, 82%, 81%, 80%, 79%, 78%, 77%, 76%, or 75% identical to the amino acid sequence of a reference Cas endonuclease set forth in SEQ ID NO: 321. In some embodiments, the amino acid sequence of the Cas endonuclease is less than 90% (e.g., 89%, 88%, 87%, 86%, 85%, 84%, 83%, 82%, 81%, 80%, 79%, 78%, 77%, 76%, 75%, 74%, 73%, 72%, 71%, 60%, 69%, 68%, 67%, 66%, 65%, 64%, 63%, 62%, 61%, 60%, 59%, 58%, 57%, 56%, 55%, 54%, 53%, 52%, 51%) and greater than 50% (e.g., 51%, 52%, 53%, 54%, 55%, 56%, 57%, 58%, 59%, 60%, 61%, 62%, 63%, 64%, 65%, 66%, 67%, 68%, 69%, 70%, 71%, 72%, 73%, 74%, 75%, 76%, 77%, 78%, 79%, 80%, 81%, 82%, 83%, 84%, 85%, 86%, 87%, 88%, 89%) identical to the amino acid sequence of a reference Cas endonuclease set forth in SEQ ID NO: 321. In some embodiments, the amino acid sequence of the Cas endonuclease is less than 90% (e.g., 89%, 88%, 87%, 86%, 85%, 84%, 83%, 82%, 81%, 80%, 79%, 78%) and greater than 76% (e.g., 77%, 78%, 79%, 80%, 81%, 82%, 83%, 84%, 85%, 86%, 87%, 88%, 89%) identical to the amino acid sequence of a reference Cas endonuclease set forth in SEQ ID NO: 321.

[0009] In some embodiments, the Cas endonuclease has one or more (e.g., 1, 2, 3, 4, 5, and/or 6) of the following properties (or engineered to have one or more of the following properties): (a) the ability to mediate double strand breaks in a target double stranded nucleic acid (e.g., DNA) molecule; (b) the ability to mediate single strand breaks in a target double stranded nucleic acid (e.g., DNA) molecule; (c) the inability to mediate double strand breaks in a target double stranded nucleic acid (e.g., DNA) molecule; (d) the ability to mediate single strand breaks in a target double stranded nucleic acid (e.g., DNA) molecule and the inability to mediate double strand breaks in a target double stranded nucleic acid (e.g., DNA) molecule (i.e., nickase activity); (f) DNA endonuclease activity; and/or (g) RNA guided DNA endonuclease activity.

[0010] In some embodiments, the amino acid sequence of the Cas endonuclease comprises one or more amino acid variation (e.g., substitution, deletion, addition). In some embodiments, the one or more amino acid variation (e.g., substitution, deletion, addition) reduces or eliminates the ability of the Cas endonuclease to mediate double strand breaks in a target double stranded nucleic acid (e.g., DNA) molecule. In some embodiments, a modified Cas endonuclease comprising the one or more amino acid variation (e.g., substitution, deletion, addition) has the ability to mediate single strand breaks in a target double stranded nucleic acid (e.g., DNA) molecule) and does not have the ability to mediate double strand breaks in a target double stranded nucleic acid (e.g., DNA) molecule (i.e., nickase activity). In some embodiments, the one or more amino acid variation (e.g., substitution, deletion, addition) alters the PAM nucleotide sequence recognized by the Cas endonuclease. In some embodiments, the one or more amino acid variation (e.g., substitution, deletion, addition) (a) reduces the Cas endonuclease activity of the endonuclease by at least 10%, 15%, 20%, 25%, 30%, 35%, 40%, 45%, 50%, 55%, 60%, 65%, 70%, 75%, 80%, 85%, 90%, 95%, 96%, 97%, 98%, 99% or 100% relative to the endonuclease lacking the one or more amino acid variation (e.g., substitution, deletion, addition); or (b) enhances the Cas endonuclease activity of the endonuclease by at least 1-fold, 2-fold, 5-fold, 10-fold, or 100-fold relative to the Cas endonuclease lacking the one or more amino acid variation (e.g., substitution, deletion, addition).

[0011] In some embodiments, the Cas endonuclease further comprises one or more heterologous moiety (e.g., a heterologous protein). In some embodiments, the Cas endonuclease comprises 2, 3, 4, or 5 or more heterologous moieties. In some embodiments, the heterologous moiety is attached to the N-terminus, C-terminus, and/or internally between the N- and C-terminus of the endonuclease. In some embodiments, the heterologous moiety (e.g., heterologous protein) is directly attached to the endonuclease. In some embodiments, the heterologous moiety (e.g., heterologous protein) is indirectly attached to the Cas endonuclease. In some embodiments, the heterologous moiety (e.g., heterologous protein) is indirectly attached to the Cas endonuclease via a linker. In some embodiments, the heterologous moiety is a peptide, protein, carbohydrate, lipid, polymer, or small molecule. In some embodiments, the heterologous moiety is a nuclear localization signal (NLS), a tag, and/or a reporter gene.

[0012] In one aspect, provided herein are conjugates comprising a Cas endonuclease described herein and one or more heterologous moieties.

[0013] In some embodiments, the heterologous moiety is a protein, peptide, small molecule, nucleic acid molecule (e.g., DNA, RNA, DNA/RNA hybrid molecule), carbohydrate, lipid, or synthetic polymer. In some embodiments, the heterologous moiety is operably connected to the N-terminus, C-terminus, and/or internally between the N- and C-terminus of the Cas endonuclease. In some embodiments, the heterologous moiety is directly operably connected to the Cas endonuclease. In some embodiments, the heterologous moiety is indirectly operably connected to the Cas endonuclease. In some embodiments, the heterologous moiety is indirectly operably connected to the Cas endonuclease via a linker.

[0014] In one aspect, provided herein are fusion proteins comprising a Cas endonuclease described herein and one or more heterologous protein. In some embodiments, the heterologous protein is fused to the N-terminus, C-terminus, and/or internally between the N- and C-terminus of the Cas endonuclease. In some embodiments, the heterologous protein is fused directly to the Cas endonuclease. In some embodiments, the heterologous protein is fused indirectly to the Cas endonuclease. In some embodiments, the heterologous protein is fused indirectly to the Cas endonuclease via a peptide linker. In some embodiments, the heterologous protein exhibits polymerase (e.g., reverse transcriptase) activity, nucleobase editing activity (e.g., deaminase activity), methylase activity, demethylase activity, transcription activation activity, transcription repression activity, transcription release factor activity, histone modification activity, nuclease activity, single-strand RNA cleavage activity, double-strand RNA cleavage activity, single-strand DNA cleavage activity, or double-strand DNA cleavage activity and nucleic acid binding activity, or any combination of the foregoing.

[0015] In some embodiments, the heterologous protein is a polymerase. In some embodiments, the polymerase has RNA-dependent DNA polymerase activity. In some embodiments, the polymerase is a reverse transcriptase (or a functional fragment, functional variant, or domain thereof). In some embodiments, the reverse transcriptase (or the functional fragment, functional variant, or domain thereof) is derived from a retrovirus or a retrotransposon. In some embodiments, the reverse transcriptase (or the functional fragment, functional variant, or domain thereof) comprises an amino acid sequence at least 85%, 86%, 87%, 88%, 89%, 90%, 91%, 92%, 93%, 94%, 95%, 96%, 97%, 98%, 99%, or 100% identical to the amino acid sequence of a protein set forth in Table 2 or set forth in any one of SEQ ID NOS: 324-476.

[0016] In some embodiments, the heterologous polypeptide is a nucleobase editor. In some embodiments, the nucleobase editor is a deaminase (or a functional fragment, functional variant, or domain thereof). In some embodiments, the deaminase (or the functional fragment, functional variant, or domain thereof) exhibits adenosine deaminase activity and/or a or a cytidine deaminase activity. In some embodiments, the deaminase (or a functional fragment, functional variant, or domain thereof) comprises an amino acid sequence at least 85%, 86%, 87%, 88%, 89%, 90%, 91%, 92%, 93%, 94%, 95%, 96%, 97%, 98%, 99%, or 100% identical to the amino acid sequence of a protein set forth in Table 3 or set forth in any one of SEQ ID NOS: 477-536. In some embodiments, the nucleobase editor is fused to an inhibitor of base excision repair (or a functional fragment or functional variant thereof) (e.g., uracil glycosylase inhibitor (UGI), nuclease dead inosine specific nuclease (dISN)).

[0017] In one aspect, provided herein are nucleic acid molecules encoding a Cas endonuclease described herein, a conjugate described herein, or a fusion protein described herein. In some embodiments, the nucleic acid molecule is a DNA or RNA (e.g., mRNA) molecule. In some embodiments, the nucleic acid molecule is codon optimized. In some embodiments, the nucleic acid molecule further comprises one or more transcription or translation regulatory elements (e.g., promoter, enhancer (e.g., cell or tissue specific transcription regulatory elements). In some embodiments, the nucleic acid molecule further encodes one or more gRNA (e.g., a crRNA, a tracrRNA, a sgRNA, a template RNA (e.g., as described herein)).

[0018] In one aspect, provided herein are vectors comprising a nucleic acid molecule described herein. In some embodiments, the vector is a viral vector or a non-viral vector (e.g., plasmid, minicircle). In some embodiments, the vector is a viral vector (e.g., an adeno associated viral (AAV) vector, a lentiviral vector, an adenoviral vector).

[0019] In one aspect, provided herein are carriers comprising a Cas endonuclease described herein, a conjugate described herein, a fusion protein described herein, a nucleic acid molecule described herein, and/or a vector described herein. In some embodiments, the carrier is a nanoparticle, polymer, virus (e.g., a recombinant virus), virus like particle, virosome, fusosome, vesicle, or lipid-based carrier. In some embodiments, the carrier is a recombinant virus (e.g., an adeno associated virus (AAV), a lentivirus, an adenovirus). In some embodiments, the carrier is a lipid-based carrier. In some embodiments, the lipid-based carrier is a lipid nanoparticle (LNP), liposome, lipoplex, nanoliposome, an exosome, or a micelle. In some embodiments, the carrier further comprises one or more gRNA (e.g., a crRNA, a tracrRNA, a sgRNA, a template RNA (e.g., as described herein)).

[0020] In one aspect, provided herein are reaction mixtures comprising (a) a cell (e.g., comprising a target nucleic acid molecule) or a target nucleic acid molecule; and (b) a Cas endonuclease described herein, a conjugate described herein, a fusion protein described herein, a nucleic acid molecule described herein, a vector described herein, a carrier described herein, and/or a pharmaceutical composition described herein.

[0021] In one aspect, provided herein are cells comprising a Cas endonuclease described herein, a conjugate described herein, a fusion protein described herein, a nucleic acid molecule described herein, a vector described herein, a reaction mixture described herein, a carrier described herein, and/or a pharmaceutical composition described herein.

[0022] In one aspect, provided herein are pharmaceutical compositions comprising a Cas endonuclease described herein, a conjugate described herein, a fusion protein described herein, a nucleic acid molecule described herein, a vector described herein, a reaction mixture described herein, a carrier described herein, and/or a cell described herein; and a pharmaceutically acceptable excipient.

[0023] In one aspect, provided herein are kits comprising a Cas endonuclease described herein, a conjugate described herein, a fusion protein described herein, a nucleic acid molecule described herein, a vector described herein, a reaction mixture described herein, a carrier described herein, a cell described herein, and/or a pharmaceutical composition described herein; and optionally instructions for using any one or more of the foregoing.

[0024] In one aspect, provided herein are systems for modifying a target nucleic acid (e.g., DNA) molecule, comprising: (a) a Cas endonuclease described herein, a conjugate described herein, a fusion protein described herein, a nucleic acid molecule described herein, a vector described herein, a carrier described herein, a reaction mixture described herein, a cell described herein, and/or a pharmaceutical composition described herein, and (b) a first gRNA (e.g., a crRNA and a tracrRNA; a sgRNA; a pegRNA, a template RNA (e.g., as described herein)) or a nucleic acid (e.g., DNA) molecule encoding the first gRNA (e.g., a crRNA and a tracrRNA; a sgRNA; template RNA (e.g., as described herein)).

[0025] In some embodiments, the system has one or more of the following characteristics: (a) the Cas endonuclease of the system is capable of binding to the first gRNA; (b) the Cas endonuclease of the system is capable of forming a break in a target nucleic acid (e.g., DNA (e.g., dsDNA)) molecule; (c) the Cas endonuclease of the system is capable of forming a single strand break in a target double stranded nucleic acid (e.g., DNA (e.g., dsDNA)) molecule; (d) the Cas endonuclease of the system is capable of forming a single strand break in the modified strand (as defined herein) of a target double stranded nucleic acid (e.g., DNA (e.g., dsDNA)) molecule; (e) the Cas endonuclease of the system is capable of forming a double strand break in a target double stranded nucleic acid (e.g., DNA (e.g., dsDNA)) molecule; (f) the Cas endonuclease of the system is incapable of forming a double strand break in a target double stranded nucleic acid (e.g., DNA (e.g., dsDNA)) molecule; (g) the Cas endonuclease of the system is capable of forming a single strand break in a target double stranded nucleic acid (e.g., DNA (e.g., dsDNA)) molecule and is incapable of forming a double strand break in a target double stranded nucleic acid (e.g., DNA (e.g., dsDNA)) molecule; (h) the Cas endonuclease of the system is capable of forming a single strand break in in the modified strand (as defined herein) of a target double stranded nucleic acid (e.g., DNA (e.g., dsDNA)) molecule and is incapable of forming a double strand break in a target double stranded nucleic acid (e.g., DNA (e.g., dsDNA)) molecule; and/or (i) the system is capable of editing (e.g., mediating the addition, deletion, or substitution of one or more nucleotides into/from) a target nucleic acid (e.g., DNA) molecule (e.g., a target double stranded DNA molecule).

[0026] In some embodiments, the system is capable of editing (e.g., mediating the addition, deletion, or substitution of one or more nucleotides into/from) a target nucleic acid (e.g., DNA) molecule (e.g., a target double stranded DNA molecule).

[0027] In some embodiments, the system is capable of editing (e.g., mediating the addition, deletion, or substitution of one or more nucleotides into/from) a target nucleic acid (e.g., DNA) molecule (e.g., a target double stranded DNA molecule) with increased efficiency relative to a reference system (e.g., comprising a reference Cas endonuclease (e.g., the reference Cas endonuclease set forth in SEQ ID NO: 321)).

[0028] In some embodiments, the system is capable of editing (e.g., mediating the addition, deletion, or substitution of one or more nucleotides into/from) a target nucleic acid (e.g., DNA) molecule (e.g., a target double stranded DNA molecule) with at least about a 30%, 35%, 40%, 45%, 50%, 55%, 60%, 65%, 70%, 75%, 80%, 85%, 90%, 95%, 100%, 110%, 120%, 130%, 140%, 150%, 160%, 170%, 180%, 190%, 200% increase in efficiency relative to a reference system (e.g., comprising a reference Cas endonuclease) (e.g., the reference Cas endonuclease set forth in SEQ ID NO: 321)).

[0029] In some embodiments, the system is capable of editing (e.g., mediating the addition, deletion, or substitution of one or more nucleotides into/from) a target nucleic acid (e.g., DNA) molecule (e.g., a target double stranded DNA molecule) with at least about a 50%, 55%, 60%, 65%, 70%, 75%, 80%, 85%, 90%, 95%, 100% increase in efficiency relative to a reference system (e.g., comprising a reference Cas endonuclease) (e.g., the reference Cas endonuclease set forth in SEQ ID NO: 321)).

[0030] In some embodiments, the system is capable of editing (e.g., mediating the addition, deletion, or substitution of one or more nucleotides into/from) a target nucleic acid (e.g., DNA) molecule (e.g., a target double stranded DNA molecule) with from about a 30%-200%, 40%-200%, 50%-200%, 60%-200%, 70%-200%, 80%-200%, 90%-200%, 100%-200%, 150%-200%, 30%-150%, 40%-150%, 50%-150%, 60%-150%, 70%-150%, 80%-150%, 90%-150%, 100%-150%, 30%-100%, 40%-100%, 50%-100%, 60%-100%, 70%-100%, 80%-100%, or 90%-100% increase in efficiency relative to a reference system (e.g., comprising a reference Cas endonuclease) (e.g., the reference Cas endonuclease set forth in SEQ ID NO: 321)).

[0031] In some embodiments, the target nucleic acid molecule is a DNA molecule. In some embodiments, the target nucleic acid molecule is a double stranded DNA (dsDNA) molecule. In some embodiments, a portion of the nucleotide sequence of the non-modified strand (as defined herein) of the target dsDNA molecule is complementary to at least a portion of the nucleotide sequence of the first gRNA. In some embodiments, the target nucleic acid molecule is within the genome of cell (e.g., a eukaryotic cell) (e.g., within a subject (e.g., a human subject), plant).

[0032] In some embodiments, (b) comprises the first gRNA (e.g., a crRNA and a tracrRNA; or a template RNA (e.g., as described herein)). In some embodiments, (b) comprises the nucleic acid (e.g., DNA) molecule encoding the first gRNA.

[0033] In some embodiments, at least a portion of the nucleotide sequence of the first gRNA is complementary to a portion of the nucleotide sequence of the target nucleic acid molecule (e.g., gene). In some embodiments, at least a portion of the nucleotide sequence of the first gRNA is complementary to a portion of the nucleotide sequence of the non-modified strand (as defined herein) of a dsDNA target nucleic acid molecule (e.g., gene). In some embodiments, at least a portion of the nucleotide sequence of the first gRNA binds to a portion of the nucleotide sequence of the non-modified strand (as defined herein) of a dsDNA target nucleic acid molecule (e.g., gene).

[0034] In some embodiments, the first gRNA comprises a sgRNA (e.g., a single sgRNA, a plurality of different sgRNAs). In some embodiments, the first gRNA comprises a crRNA (e.g., a single crRNA, a plurality of different crRNAs) and a tracrRNA (e.g., a single tracrRNA, a plurality of different tracrRNAs), wherein the crRNA and the tracrRNA are on separate RNA nucleic acid molecules (or encoded by separate nucleic acid (e.g., DNA) molecules).

[0035] In some embodiments, the first gRNA comprises a template RNA (e.g., a single template RNA, a plurality of different template RNAs) that comprises (e.g., from 5′ to 3′) a crRNA, a tracrRNA, a heterologous object sequence, and a 3′ target homology domain. In some embodiments, the template RNA further comprises a sequence that binds a polymerase (e.g., a reverse transcriptase). In some embodiments, the template RNA comprises (e.g., from 5′ to 3′) a crRNA, a tracrRNA, a sequence that binds a polymerase (e.g., a reverse transcriptase), a heterologous object sequence, and a 3′ target homology domain.

[0036] In some embodiments, the first gRNA comprises one or more nucleotide comprising one or more chemical modification (e.g., a base, ribose, and/or internucleotide linkage chemical modifications) (i.e., a modified nucleotide). In some embodiments, the modified nucleotide comprises a 2′-O-methyl (2′-OMe); 2′O-methoxyethyl (2′-O-MOE); 2′deoxy-2′-fluoro (2′-F); 2′-arabino-fluoro (2′-Ara-F); 2′-O-benzyl; 2′-O-methyl-4-pyridine (2-O-methyl-4-pyridine (2′-O—CH2Py(4)); 2′F-4′-Cα-OMe; or 2′,4′-di-Cα-OMe, 2′-O-methyl-3′-thioPACE, and/or S-constrained ethyl (cEt). In some embodiments, the modified nucleotide comprises a chemically modified internucleotide (or internucleoside) linkage. In some embodiments, the modified internucleotide (or internucleoside) linkage comprises a phosphorothioate (e.g., a chiral phosphorothioate), a phosphorodithioate, a phosphotriester, an aminoalkylphosphotriester, an alkyl (e.g., methyl) phosphonate (e.g., a 3′-alkylene phosphonate, a chiral phosphonate), a phosphinate, a phosphoroamidate (e.g., a 3′-amino phosphoroamidate, an aminoalkylphosphoramidate), a thionophosphoramidate, a thionoalkylphosphonate, a thionoalkylphosphotriester, or a boranophosphate.

[0037] In some embodiments, the first gRNA (e.g., the template RNA, sgRNA) comprises a nucleic acid molecule comprising a toe-loop, hairpin, stem-loop, pseudoknot (e.g., a Mpknot1 moiety), aptamer, G-quadraplex, tRNA, riboswitch, or ribozyme. In some embodiments, the first gRNA (e.g., the template RNA, sgRNA) wherein the nucleic acid molecule is a pseudoknot (e.g., a Mpknot1 moiety).

[0038] In some embodiments, the system further comprises a second gRNA (or a nucleic acid (e.g., DNA) molecule encoding the gRNA) that directs the endonuclease of the system to form a single strand break in the non-edited strand of a target dsDNA molecule. In some embodiments, at least a portion of the nucleotide sequence of the second gRNA is complementary to a portion of the nucleotide sequence of the edited strand (as defined herein) of a dsDNA target nucleic acid molecule. In some embodiments, at least a portion of the nucleotide sequence of the second gRNA binds to a portion of the nucleotide sequence of the edited strand (as defined herein) of a dsDNA target nucleic acid molecule. In some embodiments, the second gRNA is present on the same nucleic acid molecule as the first gRNA (or the nucleic acid (e.g., DNA) molecule encoding the second gRNA is present on the same nucleic acid (e.g., DNA) molecule encoding the first gRNA). In some embodiments, the second gRNA is present on a different nucleic acid molecule as the first gRNA (or the nucleic acid (e.g., DNA) molecule encoding the second gRNA is present on a different nucleic acid (e.g., DNA) molecule encoding the first gRNA).

[0039] In some embodiments, the system further comprises a donor template nucleic acid (e.g., DNA) molecule (e.g., as defined herein).

[0040] In one aspect, provided herein are systems for modifying a dsDNA molecule, comprising: (a) a fusion protein described herein or a nucleic acid molecule (e.g., a DNA, RNA molecule) encoding the fusion protein; and (b) a template RNA (e.g., a single template RNA, a plurality of different template RNAs) that comprises (e.g., from 5′ to 3′) a crRNA, a tracrRNA, a heterologous object sequence, and a 3′ target homology domain; or a nucleic acid molecule (e.g., a DNA molecule) encoding the template RNA.

[0041] In one aspect, provided herein are nucleic acid molecules encoding a system described herein. In some embodiments, the nucleic acid molecule is a DNA or RNA (e.g., mRNA) molecule. In some embodiments, the nucleic acid molecule is codon optimized. In some embodiments, the nucleic acid molecule further comprises one or more transcription or translation regulatory elements (e.g., promoter, enhancer (e.g., cell or tissue specific transcription regulatory elements).

[0042] In one aspect, provided herein are vectors comprising a nucleic acid molecule described herein. In some embodiments, the vector is a viral vector or a non-viral vector (e.g., plasmid, minicircle). In some embodiments, the vector is a viral vector (e.g., an adeno associated viral (AAV) vector, a lentiviral vector, an adenoviral vector).

[0043] In one aspect, provided herein are carriers comprising a system described herein, a nucleic acid molecule described herein, and/or a vector described herein. In some embodiments, the carrier is a nanoparticle, polymer, virus (e.g., a recombinant virus), virus like particle, virosome, fusosome, vesicle, or lipid-based carrier. In some embodiments, the carrier is a recombinant virus (e.g., an adeno associated virus (AAV), a lentivirus, an adenovirus). In some embodiments, the carrier is a nanoparticle. In some embodiments, the carrier is a lipid-based carrier. In some embodiments, the lipid-based carrier is a lipid nanoparticle (LNP), liposome, lipoplex, nanoliposome, an exosome, or a micelle. In some embodiments, the carrier further comprises one or more gRNA (e.g., a crRNA, a tracrRNA, a sgRNA, a template RNA (e.g., as described herein)).

[0044] In one aspect, provided herein are reaction mixtures comprising (a) a cell (e.g., comprising a target nucleic acid molecule) or a target nucleic acid molecule; and (b) a system described herein, a nucleic acid molecule described herein, a vector described herein, and/or a carrier described herein.

[0045] In one aspect, provided herein are cells comprising a system described herein, a nucleic acid molecule described herein, a vector described herein, a carrier described herein, and/or a reaction mixture described herein.

[0046] In one aspect, provided herein are pharmaceutical compositions comprising a system described herein, a nucleic acid molecule described herein, a vector described herein, a carrier described herein, a reaction mixture, and/or a cell described herein; and a pharmaceutically acceptable excipient.

[0047] In one aspect, provided herein are kits comprising a system described herein, a nucleic acid molecule described herein, a vector described herein, a carrier described herein, a reaction mixture, a cell described herein, and/or a pharmaceutical composition described herein; and optionally instructions for using any one or more of the foregoing.

[0048] In one aspect, provided herein are methods of delivering a Cas endonuclease, fusion protein, conjugate, system, nucleic acid molecule, vector, carrier, reaction mixture, cell, or pharmaceutical composition, to a cell, the method comprising, introducing into a cell a Cas endonuclease described herein, a conjugate described herein, a fusion protein described herein, a system described herein, a nucleic acid molecule described herein, a vector described herein, a carrier described herein, a reaction mixture described herein, a cell described herein, or a pharmaceutical composition described herein, to thereby deliver the Cas endonuclease, fusion protein, conjugate, system, nucleic acid molecule, vector, carrier, reaction mixture, cell, or pharmaceutical composition to the cell.

[0049] In some embodiments, the cell is in vitro, ex vivo, or in vivo. In some embodiments, the cell is euploid, is not immortalized, is part of a tissue, is part of an organism, is a primary cell, is non-dividing, is haploid (e.g., a germline cell), is a non-cancerous polyploid cell, or is from a subject having a genetic disease. In some embodiments, the cell is in a subject (e.g., a human subject). In some embodiments, the cell is in a human subject.

[0050] In one aspect, provided herein are methods of delivering a Cas endonuclease, fusion protein, conjugate, system, nucleic acid molecule, vector, carrier, reaction mixture, cell, or pharmaceutical composition, to a cell, the method comprising a Cas endonuclease described herein, a conjugate described herein, a fusion protein described herein, a system described herein, a nucleic acid molecule described herein, a vector described herein, a carrier described herein, a reaction mixture described herein, a cell described herein, or a pharmaceutical composition described herein, to thereby deliver the Cas endonuclease, fusion protein, conjugate, system, nucleic acid molecule, vector, carrier, reaction mixture, cell, or pharmaceutical composition to the subject (e.g., human subject).

[0051] In one aspect, provided herein are methods of cleaving a target site in a target nucleic acid (e.g., DNA) molecule (e.g., a double stranded target nucleic acid sequence (e.g., dsDNA, (e.g., genomic dsDNA))), the method comprising contacting the cell with a Cas endonuclease described herein, a conjugate described herein, a fusion protein described herein, a system described herein, a nucleic acid molecule described herein, a vector described herein, a carrier described herein, a reaction mixture described herein, a cell described herein, or a pharmaceutical composition described herein, to thereby cleave the target site in the target nucleic acid (e.g., DNA) molecule.

[0052] In one aspect, provided herein are methods of editing a target site in a target nucleic acid (e.g., DNA) molecule (e.g., a double stranded target nucleic acid sequence (e.g., dsDNA, (e.g., genomic dsDNA))), the method comprising contacting the cell with a Cas endonuclease described herein, a conjugate described herein, a fusion protein described herein, a system described herein, a nucleic acid molecule described herein, a vector described herein, a carrier described herein, a reaction mixture described herein, a cell described herein, or a pharmaceutical composition described herein, to thereby edit the target site in the target nucleic acid (e.g., DNA) molecule.

[0053] In one aspect, provided herein are methods of editing a target site in genomic dsDNA in a cell, the method comprising, contacting a Cas endonuclease described herein, a conjugate described herein, a fusion protein described herein, a system described herein, a nucleic acid molecule described herein, a vector described herein, a carrier described herein, a reaction mixture described herein, a cell described herein, or a pharmaceutical composition described herein, to thereby edit the target site in the genomic DNA of the cell.

[0054] In some embodiments, the cell is in vitro, ex vivo, or in vivo. In some embodiments, the cell is euploid, is not immortalized, is part of a tissue, is part of an organism, is a primary cell, is non-dividing, is haploid (e.g., a germline cell), is a non-cancerous polyploid cell, or is from a subject having a genetic disease. In some embodiments, the cell is in a subject (e.g., a human subject). In some embodiments, the cell is in a human subject.

[0055] In one aspect, provided herein are methods of editing a target site in a dsDNA molecule (e.g., genomic dsDNA (e.g., in a cell)), the method comprising: contacting a dsDNA molecule with (a) a fusion protein described herein (or a nucleic acid molecule (e.g., a DNA, RNA, nucleic acid molecule) encoding the fusion protein), and (b) a template RNA (e.g., a single template RNA, a plurality of different template RNAs) that comprises (e.g., from 5′ to 3′) a crRNA, a tracrRNA, a heterologous object sequence, and a 3′ target homology domain, to thereby modify the target site in the dsDNA molecule (or a nucleic acid molecule (e.g., a DNA nucleic acid molecule) encoding the template RNA), to thereby edit the target site in the dsDNA molecule (e.g., genomic dsDNA (e.g., in a cell)).

[0056] In some embodiments, the nucleic acid molecule is in a cell (e.g., a eukaryotic cell). In some embodiments, the cell is in vitro, ex vivo, or in vivo. In some embodiments, the cell is in a subject (e.g., a human subject). In some embodiments, the cell is in a human subject. In some embodiments, the edit comprises an addition, a deletion, or a substitution of one or more nucleotides into/from the target site of the genomic dsDNA in the cell. In some embodiments, the edit comprises an addition, a deletion, or a substitution of one or more nucleotides into/from the target site of the target nucleic acid molecule. In some embodiments, the addition comprises the addition of from about 1-500, 1-3200, 1-300, 1-200, 1-100, 1-90, 1-80, 1-70, 1-60, 1-50, 1-320, 1-30, 1-20, 1-10, 1-9, 1-8, 1-7, 1-6, 1-5, 1-4, 1-3, or 1-2 nucleotides at the target site. In some embodiments, the deletion comprises the deletion of from about 1-500, 1-3200, 1-300, 1-200, 1-100, 1-90, 1-80, 1-70, 1-60, 1-50, 1-320, 1-30, 1-20, 1-10, 1-9, 1-8, 1-7, 1-6, 1-5, 1-4, 1-3, or 1-2 nucleotides at the target site.

[0057] In one aspect, provided herein are methods of treating ameliorating, or preventing a disease in a subject (e.g., a human subject) in need thereof, the method comprising administering to a Cas endonuclease described herein, a conjugate described herein, a fusion protein described herein, a system described herein, a nucleic acid molecule described herein, a vector described herein, a carrier described herein, a reaction mixture described herein, a cell described herein, or a pharmaceutical composition described herein, thereby treat, ameliorate, or prevent the disease in the subject.

[0058] In some embodiments, the disease is associated with a genetic defect. In some embodiments, the gRNA of the system is capable of targeting the endonuclease to the site of the genetic defect. In some embodiments, the genetic defect comprises a duplication of a gene, deletion of a gene, or a mutation of a gene. In some embodiments, the administration results in the correction of the genetic defect. In some embodiments, the subject is a human subject.

[0059] In one aspect, provided herein are Cas endonucleases, conjugates, fusion proteins, systems, nucleic acid molecules, vectors, carriers, reaction mixtures, cells, or pharmaceutical compositions for use in cleaving a target site in a target nucleic acid (e.g., DNA) molecule (e.g., a double stranded target nucleic acid sequence (e.g., dsDNA, (e.g., genomic dsDNA))) in a subject in need thereof.

[0060] In one aspect, provided herein is the use of a Cas endonuclease described herein, a conjugate described herein, a fusion protein described herein, a system described herein, a nucleic acid molecule described herein, a vector described herein, a carrier described herein, a reaction mixture described herein, a cell described herein, or a pharmaceutical composition described herein for the manufacture of a medicament for the cleaving a target site in a target nucleic acid (e.g., DNA) molecule (e.g., a double stranded target nucleic acid sequence (e.g., dsDNA, (e.g., genomic dsDNA))) in a subject in need thereof.

[0061] In one aspect, provided herein is a Cas endonuclease described herein, a conjugate described herein, a fusion protein described herein, a system described herein, a nucleic acid molecule described herein, a vector described herein, a carrier described herein, a reaction mixture described herein, a cell described herein, or a pharmaceutical composition described herein for use in editing a target site in a target nucleic acid (e.g., DNA) molecule (e.g., a double stranded target nucleic acid sequence (e.g., dsDNA, (e.g., genomic dsDNA))) in a subject in need thereof.

[0062] In one aspect, provided herein is the use of a Cas endonuclease described herein, a conjugate described herein, a fusion protein described herein, a system described herein, a nucleic acid molecule described herein, a vector described herein, a carrier described herein, a reaction mixture described herein, a cell described herein, or a pharmaceutical composition described herein for the manufacture of a medicament for the editing a target site in a target nucleic acid (e.g., DNA) molecule (e.g., a double stranded target nucleic acid sequence (e.g., dsDNA, (e.g., genomic dsDNA))) in a subject in need thereof.

[0063] In one aspect, provided herein is a Cas endonuclease described herein, a conjugate described herein, a fusion protein described herein, a system described herein, a nucleic acid molecule described herein, a vector described herein, a carrier described herein, a reaction mixture described herein, a cell described herein, or a pharmaceutical composition described herein for use as a medicament.

[0064] In one aspect, provided herein is a Cas endonuclease described herein, a conjugate described herein, a fusion protein described herein, a system described herein, a nucleic acid molecule described herein, a vector described herein, a carrier described herein, a reaction mixture described herein, a cell described herein, or a pharmaceutical composition described herein for use in the treatment of a disease in a subject in need thereof (e.g., a disease is associated with a genetic defect).

[0065] In one aspect, provided herein is the use of a Cas endonuclease described herein, a conjugate described herein, a fusion protein described herein, a system described herein, a nucleic acid molecule described herein, a vector described herein, a carrier described herein, a reaction mixture described herein, a cell described herein, or a pharmaceutical composition described herein for the manufacture of a medicament for the treatment of a disease in a subject in need thereof (e.g., a disease is associated with a genetic defect).

### 4. DETAILED DESCRIPTION

[0066] Typical CRISPR-Cas editing (e.g., gene editing) systems require a Cas endonuclease to mediate cleavage of the target nucleic acid molecule. Cas endonucleases vary in their ability to mediate target cleavage (e.g., in a cell) depending on e.g., the efficiency of target cleavage, their capability to mediate double and/or single strand breaks, protospacer adjacent motif (PAM) sequence requirements, the specificity of the PAM, etc. As such, a diverse set of Cas endonucleases is useful to provide the ability to select a suitable Cas endonuclease for each specific target nucleic acid molecule; particularly given the incredibly diverse range of potential target nucleic acid molecules (e.g., diverse range of genes).

[0067] The inventors have, inter alia, discovered novel Cas endonucleases. As such, the Cas endonucleases described herein can be used to modify, e.g., cleave, DNA, for example, can be used in nucleic acid editing systems (e.g., CRISPR-Cas systems). Accordingly, the current disclosure provides, inter alia, Cas endonucleases capable of cleaving target nucleic acid molecules (e.g., DNA, genes, genomic DNA) (e.g., in a cell, in a cell in a subject); as well as systems and methods of utilizing the same (e.g., methods of cleaving a nucleic acid molecule, methods of editing a nucleic acid molecule (e.g., genomic DNA), and methods of treating diseases (e.g., genetic diseases)).

### Table of Contents

[0068] 4.1 Definitions
[0069] 4.2 Cas Endonucleases
[0070] 4.2.1 Activity of Cas Endonucleases
[0071] 4.2.1.1 Endonuclease Activity
[0072] 4.2.1.2 gRNA Binding Activity
[0073] 4.2.1.3 Target Nucleic Acid Molecule Binding Activity
[0074] 4.2.1.4 Target Nucleic Acid Editing Activity
[0075] 4.2.1.5 Alteration of Activity
[0076] 4.3 Cas Endonuclease Fusion Proteins & Conjugates
[0077] 4.3.1 Heterologous Proteins
[0078] 4.3.1.1 Polymerases (e.g., Reverse Transcriptases (RTs))
[0079] 4.3.1.2 Nucleobase Editors
[0080] 4.3.2 Linkers
[0081] 4.3.3 Orientation
[0082] 4.4 Methods of Making Proteins
[0083] 4.5 Systems
[0084] 4.5.1 Target Nucleic Acid Molecules
[0085] 4.5.2 gRNAs
[0086] 4.5.2.1 Multiple gRNAs
[0087] 4.5.2.2 Modified gRNAs
[0088] 4.5.2.2(i) Nature of the Modifications
[0089] 4.5.2.2(i)(a) Sugar Modifications
[0090] 4.5.2.2(i)(b) Nucleobase Modifications
[0091] 4.5.2.2(i)(c) Internucleoside Linkage Modifications
[0092] 4.5.2.2(i)(d) Exemplary Combinations of Modifications
[0093] 4.5.2.2(ii) Location of Modifications
[0094] 4.5.2.3 Methods of Making gRNAs
[0095] 4.5.3 Nucleic Acid Editing Activity of Systems
[0096] 4.5.4 Methods of Assessing Nucleic Acid Editing Activity of Systems
[0097] 4.5.5 Exemplary Systems
[0098] 4.5.5.1 HDR Based Editing Systems
[0099] 4.5.5.2 RT Based Editing Systems
[0100] 4.5.5.3 Nucleobase Editor Editing Systems
[0101] 4.6 Nucleic Acid Molecules
[0102] 4.7 Vectors
[0103] 4.8 Carriers
[0104] 4.8.1 Lipid Based Carriers
[0105] 4.8.1.1 Cationic Lipids (Positively Charged) and Ionizable Lipids
[0106] 4.8.1.2 Non-Cationic Lipids (e.g., Phospholipids)
[0107] 4.8.1.3 Structural Lipids
[0108] 4.8.1.4 Polymers and Polyethylene Glycol (PEG)—Lipids
[0109] 4.8.1.5 Percentages of Lipid Nanoformulation Components
[0110] 4.9 Cells
[0111] 4.10 Reaction Mixtures
[0112] 4.11 Pharmaceutical Compositions
[0113] 4.12 Kits
[0114] 4.13 Methods of Use
[0115] 4.13.1 Methods of Delivery
[0116] 4.13.2 Methods of Cleaving a Target Nucleic Acid Molecule
[0117] 4.13.3 Methods of Editing a Target Nucleic Acid Molecule
[0118] 4.13.3.1 Methods of Editing a Target Nucleic Acid Molecule Utilizing an RT-Based System
[0119] 4.13.3.2 Methods of Editing a Target Nucleic Acid Molecule Utilizing an HDR-Based System
[0120] 4.13.3.3 Methods of Editing a Target Nucleic Acid Molecule Utilizing a Nucleobase Editor-Based System
[0121] 4.13.4 Methods of Treating, Ameliorating, or Preventing a Disease

### 4.1 Definitions

[0122] The section headings used herein are for organizational purposes and do not limit the subject matter described.

[0123] Unless defined otherwise, all technical and scientific terms used herein have the same meaning as is understood by one of skill in the art to which the claimed subject matter belongs. It is to be understood that the general and detailed descriptions are exemplary and explanatory and are not restrictive of claimed subject matter.

[0124] In this application, the use of the singular includes the plural unless stated otherwise. For example, as used in the disclosure, the singular forms “a,” “an,” and “the” include plural referents unless the context dictates otherwise. Furthermore, use of the term “including” as well as other forms, such as “include,” “includes,” and “included,” is not limiting.

[0125] It is understood that aspects and embodiments described herein with “comprising” language, also otherwise include analogous aspects and embodiments described in terms of “consisting of” and “consisting essentially of”.

[0126] The term “and/or” is to be taken as specific disclosure of each of the two specified features or components with or without the other. Thus, “and/or” as used in a phrase such as “A and/or B” herein is intended to include “A and B,” “A or B,” “A” (alone), and “B” (alone). Likewise, “and/or” as used in a phrase such as “A, B, and/or C” is intended to encompass each of the following aspects: A, B, and C; A, B, or C; A or C; A or B; B or C; A and C; A and B; B and C; A (alone); B (alone); and C (alone).

[0127] As described herein, concentration ranges, percentage ranges, ratio ranges or integer ranges are understood to include the value of any integer within the recited range and, when appropriate, fractions thereof (such as one tenth and one hundredth of an integer), unless otherwise indicated.

[0128] The terms “about” refers to a value or composition that is within an acceptable error range for the particular value or composition as understood and/or determined by one of ordinary skill in the art, which will depend in part on how the value or composition is measured or determined, i.e., limitations of the measurement system. When particular values or compositions are provided in the disclosure, unless otherwise stated, the meaning of “about” is understood to be within an acceptable error range for that particular value or composition.

[0129] Where proteins are described herein, it is understood that polynucleotides (e.g., RNA or DNA nucleic acid molecules) encoding the proteins are also provided herein.

[0130] Where proteins, nucleic acid molecules, vectors, carriers, etc. are described herein, it is understood that isolated forms of the proteins, nucleic acid molecules, vectors, carriers, etc. are also provided herein.

[0131] Where proteins, nucleic acid molecules, etc. are described herein, it is understood that recombinant forms of the proteins, nucleic acid molecules, etc. are also provided herein.

[0132] Where proteins or sets of proteins are described herein, it is understood that both proteins comprising the primary structure are provided herein as well as proteins folded into their three-dimensional structure (i.e., tertiary or quaternary structure) are provided herein.

[0133] As used herein, the term “administering” refers to the physical introduction of an agent, e.g., a therapeutic agent (or a precursor of the therapeutic agent that is metabolized or altered within the body of the subject to produce the therapeutic agent in vivo) (e.g., systems comprising endonucleases for introducing variations into a target nucleic acid) to a subject, using any of the various methods and delivery systems known to those skilled in the art. Administering can also be performed, for example, once, a plurality of times, and/or over one or more extended periods. Therapeutic agents include agents whose effect is intended to be preventative (i.e., prophylactic), such as agents for modifying target nucleic acids (e.g., systems comprising endonucleases for introducing a variation into a target nucleic acid).

[0134] As used herein, the term “bicyclic sugar” refers to a modified sugar (e.g., ribose) moiety comprising two rings, wherein the second ring is formed via a bridge connecting two of the atoms in the first ring thereby forming a bicyclic structure. In some embodiments, the first ring of the bicyclic sugar moiety is a furanosyl moiety. In some embodiments, the furanosyl sugar moiety is a ribosyl moiety.

[0135] As used herein, the term “bicyclic nucleoside” (“BNA”) is a nucleoside comprising a bicyclic sugar.

[0136] As used herein, the term “crRNA” refers to an RNA molecule (e.g., part of a gRNA (e.g., a sgRNA)) that is capable of binding to the protospacer in a target nucleic acid (e.g., DNA) molecule.

[0137] As used herein, the term “disease” refers to an abnormal condition that impairs physiological function. The term encompasses any disorder, illness, abnormality, pathology, sickness, condition, or syndrome in which physiological function is impaired, irrespective of the nature of the etiology. The term disease includes infection (e.g., a viral, bacterial, fungal, protozoal infection).

[0138] As used herein, the term “donor template nucleic acid molecule” refers to a nucleic acid molecule that contains a donor region comprising a nucleic acid sequence of interest (e.g., contains a nucleotide variation of interest (e.g., a substitution, addition, deletion, inversions, etc.)) and two homology arms each comprising a nucleotide sequence of sufficient homology to the nucleotide sequence of the region flanking the target cleavage site of an endonuclease described herein (also referred to herein as homology arms). Each of the homology arms flank the donor region, such that the donor region is between the two homology arms. In some embodiments, the donor template nucleic acid molecule is a donor DNA template nucleic acid molecule. In some embodiments, the donor template nucleic acid molecule is an RNA template molecule. In some embodiments, the donor template nucleic acid molecule is double stranded. In some embodiments, the donor template nucleic acid molecule is single stranded. In some embodiments, the donor template nucleic acid molecule can be utilized in a system described herein (e.g., an HDR based system described herein), wherein the molecular machinery of the cell can utilize the exogenous donor template nucleic acid in repairing and/or resolving a cleavage site in a target nucleic acid molecule mediated by an endonuclease (or functional fragment, functional variant, or domain thereof) (e.g., of the system).

[0139] The terms “DNA” and “polydeoxyribonucleotide” are used interchangeably and refer to macromolecules including multiple deoxyribonucleotides that are polymerized via phosphodiester bonds. Deoxyribonucleotides are nucleotides in which the sugar is deoxyribose.

[0140] As used herein, the term “domain” refers to a structure of a biomolecule (e.g., a protein, nucleic acid (e.g., DNA, RNA)) molecule) that contributes to a specified function of the biomolecule (e.g., a protein, nucleic acid (e.g., DNA, RNA)). A domain may comprise a contiguous region (e.g., a contiguous sequence) or distinct non-contiguous regions (e.g., non-contiguous sequences) of a biomolecule. Examples of protein domains include, but are not limited to, an endonuclease domain, a DNA binding domain, a reverse transcriptase domain; an example of a domain of a nucleic acid is a regulatory domain, such as a transcription factor binding domain. In some embodiments, a domain (e.g., a Cas domain) can comprise two or more smaller domains (e.g., a DNA binding domain and an endonuclease domain).

[0141] As used herein, the term “editing” with reference to a nucleic acid molecule (e.g., a target nucleic acid (e.g., DNA) molecule (e.g., a double stranded target nucleic acid sequence (e.g., dsDNA, (e.g., genomic dsDNA))) refers to the introduction of a variation (as defined herein) (also referred to as an edit herein) in the nucleic acid molecule. In some embodiments, the variation or edit comprises a substitution, addition, deletion, or inversion.

[0142] As used herein, the term “edited strand” with reference to a double stranded nucleic acid molecule (e.g., a dsDNA molecule) refers to the strand of the double stranded nucleic acid molecule that is edited by e.g., an endonuclease, system, etc. described herein. Likewise, as used herein, the term “non-edited strand” with reference to a double stranded nucleic acid molecule (e.g., a dsDNA molecule) refers to the strand of the double stranded nucleic acid molecule that is not edited by e.g., an endonuclease, system, etc. described herein.

[0143] As used herein, the term “functional fragment” in reference to a protein refers to a fragment of a reference protein that retains at least one particular function. Not all functions of the reference protein need be retained by a functional fragment of the protein. In some instances, one or more functions are selectively reduced or eliminated. In some embodiments, the reference protein is a wild type protein. For example, a functional fragment of a polymerase, reverse transcriptase or endonuclease can refer to a fragment of said protein that retains activity. In some embodiments, the functional fragment comprises one or more domains (e.g., 1, 2, 3, or more) of the reference protein.

[0144] As used herein, the term “functional variant” in reference to a protein refers to a protein that comprises at least one but not more than 20%, not more than 15%, not more than 12%, no more than 10%, no more than 8% amino acid variation (e.g., substitution, deletion, addition) compared to the amino acid sequence of a reference protein, wherein the protein retains at least one particular function of the reference protein. Not all functions of the reference protein (e.g., wild type) need be retained by the functional variant of the protein. In some instances, one or more functions are selectively altered, reduced or eliminated (e.g., endonuclease activity). In some embodiments, the reference protein is a wild type protein. In some embodiments, the functional variant comprises one or more domains (e.g., 1, 2, 3, or more) of the reference protein.

[0145] As used herein, the term “functional fragment or variant thereof” and the like with reference to an agent (e.g., a protein) should be understood to include functional variants, functional variants, functional fragments, and variants.

[0146] As used herein, the term “fuse” and grammatical equivalents thereof refers to the operable connection of at least a first polypeptide to a second polypeptide, wherein the first and second polypeptides are not naturally found operably connected together. For example, the first and second polypeptides are derived from different proteins and/or are from different organisms. The term fuse encompasses both a direct connection of the at least two polypeptides through a peptide bond, and the indirect connection through a linker (e.g., a peptide linker).

[0147] As used herein, the term “fusion protein” and grammatical equivalents thereof refer to a protein that comprises at least one polypeptide operably connected to another polypeptide, wherein the first and second polypeptides are not naturally found operably connected together. For example, the first and second polypeptides of the fusion protein are each derived from different proteins and/or are from heterologous organisms. In some embodiments, the first and second polypeptides are different. For the sake of clarity, it will be understood that neither the first nor second polypeptide is required to be a full-length protein (e.g., a full-length naturally occurring protein). For example, the first and/or second polypeptide can comprise or consist of fragments (e.g., functional fragments or domains of full-length proteins (e.g., engineered, naturally occurring). The at least two polypeptides of the fusion protein can be directly operably connected through a peptide bond; or can be indirectly operably connected through a linker (e.g., a peptide linker). Thus, the term fusion polypeptide encompasses embodiments, wherein Polypeptide A is directly operably connected to Polypeptide B through a peptide bond (Polypeptide A-Polypeptide B), and embodiments, wherein Polypeptide A is operably connected to Polypeptide B through a peptide linker (Polypeptide A-peptide linker-Polypeptide B).

[0148] As used herein, the term “guide RNA” or “gRNA” refers to an RNA molecule that can associate with an endonuclease (e.g., an endonuclease described herein) to direct the endonuclease (e.g., an endonuclease described herein) to a target nucleic acid molecule (e.g., within a gene (e.g., within a cell)). A gRNA requires a crRNA and a tracrRNA. As described throughout, the crRNA and tracrRNA may be part of the same larger RNA molecule (e.g., a sgRNA) or separate RNA molecules.

[0149] As used herein, the term “heterologous,” when used to describe a first element in reference to a second element means that the first element and second element do not exist in nature disposed as described. For example, a protein comprising a “heterologous moiety” means a protein that is joined to a moiety (e.g., small molecule, protein, polynucleotide, carbohydrate, lipid, synthetic polymer (e.g., polymers of PEG), etc.) that is not joined to the protein in nature.

[0150] As used herein, the term “heterologous object sequence” refers to an RNA molecule that encodes a desired edit (e.g., substitution, addition, deletion of one or more nucleotides) of a target nucleic acid (e.g., DNA) sequence (e.g., a gene) that can be utilized as a template strand by a polymerase (e.g., a reverse transcriptase) (e.g., described herein) to polymerize the desired nucleic acid sequence (e.g., DNA sequence (e.g., gene sequence)) (i.e., to polymerize sequence complementary to the edit template). In some embodiments, the edit template is part of a template gRNA (e.g., described herein).

[0151] It is clear from the disclosure, but for the sake of clarity, it is to be understood that the use of the term “heterologous protein” (e.g., any heterologous protein described herein) includes the full-length protein, as well as less than the full-length protein, including, e.g., functional fragments, functional variants, and domains of the full-length protein.

[0152] As used herein, the term “isolated” with reference to a biomolecule (e.g., a protein or polynucleotide) refers to a biomolecule (e.g., a protein or polynucleotide) that is substantially free of other cellular components with which it is associated in the natural state.

[0153] As used herein, the term “translatable RNA” refers to any RNA that encodes at least one polypeptide and can be translated to produce the encoded protein in vitro, in vivo, in situ or ex vivo. A translatable RNA may be an mRNA or a circular RNA encoding a polypeptide.

[0154] As used herein, the terms “agent” and “moiety” are used interchangeably herein and refer to any macro or micro molecule that can be operably connected to another macro or micro molecule (e.g., a protein (e.g., an endonuclease (or a functional fragment, functional variant, or domain thereof)) or a nucleic acid molecule encoding the protein (e.g., endonuclease)). Exemplary moieties include, but are not limited small molecules, proteins, polynucleotides (e.g., DNA, RNA), carbohydrates, lipids, synthetic polymers (e.g., polymers of PEG).

[0155] The terms “nucleic acid molecule” and “polynucleotide” are used interchangeably herein and refer to a polymer of DNA or RNA. The nucleic acid molecule can be single-stranded or double-stranded; contain natural, non-natural, or altered nucleotides; and contain a natural, non-natural, or altered internucleotide linkage, including a phosphoroamidate linkage or a phosphorothioate linkage, instead of the phosphodiester found between the nucleotides of an unmodified nucleic acid molecule. Nucleic acid molecules include, but are not limited to, all nucleic acid molecules which are obtained by any means available in the art, including, without limitation, recombinant means, e.g., the cloning of nucleic acid molecules from a recombinant library or a cell genome, using ordinary cloning technology and polymerase chain reaction, and the like, and by synthetic means. The skilled artisan appreciates that, except where otherwise noted, nucleic acid sequences set forth in the instant application will recite thymidine (T) in a representative DNA sequence but where the sequence represents RNA (e.g., mRNA), the thymidines (Ts) would be substituted for uracils (Us). Thus, any of the RNA polynucleotides encoded by a DNA identified by a particular sequence identification number may also comprise the corresponding RNA (e.g., mRNA) sequence encoded by the DNA, where each thymidine (T) of the DNA sequence is substituted with uracil (U).

[0156] As used herein, the term “nucleobase editor” refers to an agent (e.g., a biomolecule (e.g., a protein (or a functional fragment, functional variant, or domain thereof))) that can mediate nucleobase editing activity.

[0157] As used herein, the term “nucleobase editing activity” refers to the ability of an agent (e.g., a biomolecule (e.g., a protein (or a functional fragment, functional variant, or domain thereof))) to chemically alter a nucleobase within a polynucleotide. In some embodiments, the nucleobase editing activity is cytidine deaminase activity, e.g., converting a target C·G to T·A. In some embodiments, the nucleobase editing activity is adenosine deaminase activity, e.g., converting A·T to G·C. In some embodiment, the nucleobase editing activity is cytidine deaminase activity and adenosine deaminase activity, e.g., converting A·T to G·C.

[0158] As used herein, the term “operably connected” refers to the linkage of two moieties in a functional relationship. For example, a polypeptide is operably connected to another polypeptide when they are linked (either directly or indirectly via a peptide linker) such that both polypeptides are functional (e.g., an in-frame fusion protein comprising an endonuclease described herein). Or for example, a transcription regulatory polynucleotide e.g., a promoter, enhancer, or other expression control element operably linked to a polynucleotide that encodes a protein to affect the transcription of the polynucleotide that encodes the protein. The term “operably connected” also refers to the conjugation of a moiety to e.g., a polynucleotide or polypeptide (e.g., the conjugation of a PEG polymer to a protein).

[0159] As used herein, the term “PAM” or “protospacer adjacent motif” refers to a short nucleic acid molecule (usually about 2-6 base pairs in length) that follows the nucleic acid region targeted for cleavage by an endonuclease (e.g., described herein (e.g., of a system described herein)). In some embodiments, the PAM is required for an endonuclease (e.g., described herein (e.g., of a system described herein)) to cleave the target nucleic acid molecule and is generally located near (e.g., 3-4 nucleotides) downstream of the cleavage site.

[0160] Determination of “percent identity” between two sequences (e.g., protein (amino acid sequences) or polynucleotide (nucleic acid sequences)), as used herein, can be accomplished using a mathematical algorithm. For example, a specific, non-limiting example of an algorithm utilized for the comparison of two sequences is described in Karlin S & Altschul S F (1990) PNAS 87: 2264-2268, modified as in Karlin S & Altschul S F (1993) PNAS 90: 5873-5877, each of which is herein incorporated by reference in its entirety. Such algorithm(s) is incorporated into the NBLAST and XBLAST programs of Altschul S F et al., (1990) J Mol Biol 215: 403, which is incorporated herein by reference in its entirety. BLAST nucleotide searches are performed with the NBLAST nucleotide program parameters set, e.g., for score=100, wordlength=12 to obtain nucleotide sequences homologous to a nucleic acid molecule described herein. BLAST protein searches can be performed with the XBLAST program parameters set, e.g., to score 50, wordlength=3 to obtain amino acid sequences homologous to a protein molecule described herein. For gapped alignment comparison purposes, Gapped BLAST can be utilized as described in Altschul S F et al., (1997) Nuc Acids Res 25: 3389-3402, which is herein incorporated by reference in its entirety. Alternatively, PSI BLAST can be used to perform searches which detect distant relationships between molecules (Id.). When utilizing BLAST, Gapped BLAST, and PSI Blast programs, default parameters of the respective programs (e.g., of XBLAST and NBLAST) can be used (see, e.g., National Center for Biotechnology Information (NCBI) on the worldwide web, ncbi.nlm.nih.gov). Another specific, non-limiting example of a mathematical algorithm utilized for the comparison of sequences is described in Myers and Miller, 1988, CABIOS 4:11-17, which is herein incorporated by reference in its entirety. Such an algorithm is incorporated in the ALIGN program (version 2.0) and is a part of the GCG sequence alignment software package. When comparing amino acid sequences with the ALIGN program, a PAM120 weight residue table, a gap length penalty of 12, and a gap penalty of 4 can be used. Percent identity between two sequences can be determined using techniques similar to those described above, with or without allowing gaps. In calculating percent identity, typically only exact matches are counted.

[0161] As used herein, the term “plurality” means 2 or more (e.g., 3 or more, 4 or more, 5 or more, 6 or more, 7 or more, 9 or more, or 10 or more).

[0162] As used herein, the term “pharmaceutical composition” refers to a composition that is suitable for administration to an animal, e.g., a human subject, and comprises an agent (e.g., therapeutic agent) and a pharmaceutically acceptable carrier or diluent. A “pharmaceutically acceptable carrier or diluent” means a substance intended for use in contact with the tissues of human beings and/or non-human animals, and without excessive toxicity, irritation, allergic response, or other problem or complication, commensurate with a reasonable therapeutic benefit/risk ratio.

[0163] As used herein, “protein” and “polypeptide” refer to a polymer of at least 2 (e.g., at least 5) amino acids linked by a peptide bond. The term “polypeptide” does not denote a specific length of the polymer chain of amino acids. It is common in the art to refer to shorter polymers of amino acids (e.g., approximately 2-50 amino acids) as peptides; and to refer to longer polymers of amino acids (e.g., approximately over 50 amino acids) as polypeptides. However, the terms “peptide” and “polypeptide” and “protein” are used interchangeably herein. In some embodiments, a protein is folded into its three-dimensional structure. Where proteins are contemplated herein, it should be understood that proteins comprising the primary structure are provided herein as well as proteins folded into their three-dimensional structure (i.e., tertiary or quaternary structure) are provided herein.

[0164] As used herein, the term “prophylactic treatment” and the like refers to a treatment administered to a subject for the purpose of decreasing the risk of developing pathology in a subject who does not exhibit signs of a disease or exhibits only early signs of a disease.

[0165] The terms “RNA” and “polyribonucleotide” are used interchangeably herein and refer to macromolecules that include multiple ribonucleotides that are polymerized via phosphodiester bonds. Ribonucleotides are nucleotides in which the sugar is ribose. RNA may contain modified nucleotides; and contain natural, non-natural, or altered internucleotide linkages, such as a phosphoroamidate linkage or a phosphorothioate linkage, instead of the phosphodiester found between the nucleotides of an unmodified nucleic acid molecule.

[0166] As used herein, the term “sgRNA” refers to a gRNA molecule that comprises both a crRNA and a tracrRNA. The components of the sgRNA may be arranged in any suitable order and any component may be operably connected to the adjacent component(s) directly or indirectly (e.g., via a nucleotide linker).

[0167] As used herein, the term “signal peptide” or “signal sequence” refers to a sequence that can direct the transport or localization of a protein, such as an endonuclease, to a certain organelle, cell compartment, or extracellular export. The term encompasses both the signal sequence peptide and the nucleic acid sequence encoding the signal peptide. Thus, references to a signal peptide in the context of a nucleic acid refers to the nucleic acid sequence encoding the signal peptide. Exemplary signal sequences include for example, nuclear localization signal and nuclear export signal.

[0168] As used herein, the term “subject” includes any animal, such as a human or other animal. In some embodiments, the subject is a vertebrate animal (e.g., mammal, bird, fish, reptile, or amphibian). In some embodiments, the subject is a human. In some embodiments, the method subject is a non-human mammal. In some embodiments, the subject is a non-human mammal such as a non-human primate (e.g., monkeys, apes), ungulate (e.g., cattle, buffalo, sheep, goat, pig, camel, llama, alpaca, deer, horses, donkeys), carnivore (e.g., dog, cat), rodent (e.g., rat, mouse), or lagomorph (e.g., rabbit). In some embodiments, the subject is a bird, such as a member of the avian taxa Galliformes (e.g., chickens, turkeys, pheasants, quail), Anseriformes (e.g., ducks, geese), Paleaognathae (e.g., ostriches, emus), Columbiformes (e.g., pigeons, doves), or Psittaciformes (e.g., parrots).

[0169] As used herein, the term “template RNA” refers to gRNA molecule that comprises a crRNA, a tracrRNA, a heterologous object sequence, and a 3′ target homology domain. In some embodiments, the template RNA further comprises an RNA sequence that binds a polymerase (e.g., a reverse transcriptase, e.g., of a fusion protein described herein). The components of the template RNA may be arranged in any suitable order and any component may be operably connected to the adjacent component(s) directly or indirectly (e.g., via a nucleotide linker). In some embodiments, the template RNA comprises from 5′ to 3′ a crRNA, a tracrRNA, a heterologous object sequence, and a 3′ target homology domain. In some embodiments, the template RNA comprises from 5′ to 3′ a crRNA, a tracrRNA, a sequence that binds a polymerase (e.g., a reverse transcriptase, e.g., of a fusion protein described herein), a heterologous object sequence, and a 3′ target homology domain. In some embodiments, the template RNA is part of a system (e.g., a reverse transcriptase-based system) described herein.

[0170] As used herein, the term “therapeutically effective amount” of an agent (e.g., therapeutic agent) refers to any amount of the agent (e.g., therapeutic agent) that, when used alone or in combination with another therapeutic agent, improves a disease condition, e.g., protects a subject against the onset of a disease (or infection); improves a symptom of disease or infection, e.g., decreases severity of disease or infection symptoms, decreases frequency or duration of disease or infection symptoms, increases disease or infection symptom-free periods; prevents or reduces impairment or disability due to the disease or infection; or promotes disease (or infection) regression. The ability of a therapeutic agent to improve a disease condition can be evaluated using a variety of methods known to the skilled practitioner, such as in human subjects during clinical trials, in animal model systems predictive of efficacy in humans, or by assaying the activity of the agent in in vitro assays.

[0171] As used herein, the term “tracrRNA” refers to an RNA molecule (e.g., part of a gRNA (e.g., a sgRNA)) that mediates binding of a gRNA to an endonuclease (e.g., an endonuclease described herein).

[0172] As used herein, the terms “treat,” treating,” “treatment,” and the like refer to reducing or ameliorating a disease and/or symptom(s) associated therewith or obtaining a desired pharmacologic and/or physiologic effect. It will be appreciated that, although not precluded, treating a disease does not require that the disease, or symptom(s) associated therewith be completely eliminated. In some embodiments, the effect is therapeutic, i.e., without limitation, the effect partially or completely reduces, diminishes, abrogates, abates, alleviates, decreases the intensity of, or cures a disease and/or adverse symptom attributable to the disease. In some embodiments, the effect is preventative, i.e., the effect protects or prevents an occurrence or reoccurrence of a disease. To this end, the presently disclosed methods comprise administering a therapeutically effective amount of a compositions as described herein.

[0173] As used herein, “variant” or “variation” with reference to a nucleic acid molecule (e.g., a nucleic acid molecule encoding an endonuclease as described herein), refers to a nucleic acid molecule that comprises at least one substitution, inversion, addition, or deletion of nucleotide compared to a reference nucleic acid molecule. As used herein, the term “variant” or “variation” with reference to a protein refers to a peptide or protein (e.g., endonucleases described herein) that comprises at least one substitution, inversion, addition, or deletion of an amino acid residue compared to a reference protein.

[0174] As used herein, the term “3′ target homology domain” refers to an RNA molecule that is capable of hybridizing to the 3′ end of a single stranded nucleic acid flap (the 3′target sequence) created after induction of a single strand break (i.e., a nick) in a target double stranded nucleic acid (e.g., DNA) molecule (e.g., by an endonuclease described herein (or a fusion protein comprising the same)). The hybridization of the 3′ target homology domain to the 3′ target sequence creates a duplex that can be utilized as a substrate by a polymerase (e.g., a reverse transcriptase) (e.g., described herein) for polymerization of a nucleic acid (e.g., DNA) molecule (e.g., utilizing the heterologous object sequence). In some embodiments, the 3′ target homology domain is part of a template RNA (e.g., described herein).

### 4.2 Cas Endonucleases

[0175] Provided herein are, inter alia, Cas endonucleases (and functional fragments, functional variants, and domains thereof), useful in, inter alia, modifying (e.g., editing) a nucleic acid molecule (e.g., DNA, gene, genome (e.g., within a cell, e.g., within a cell in a subject (e.g., a mammalian subject, e.g., a human subject))) (e.g., in vivo, ex vivo, or in vitro). In some embodiments, the Cas endonuclease is non-naturally occurring. The amino acid sequence of exemplary Cas endonucleases of the disclosure is set forth in Table 1 and in SEQ ID NOS: 1-320.

TABLE 1
The Amino Acid Sequence of Cas Endonucleases.

| | | SEQ |
|---|---|---|
| Description | Amino Acid Sequence | ID NO |
| CasEnd-41 | MKKKYSIGLDIGTNSVGWAVITDEYKVPSKKFKVLGNTDRQSIKKNLIGALL | 1 |
| | FDSGETAEATRLKRTARRRYTRRKNRIRYLQEIFSNEMAKVDDSFFHRLEES | |
| | FLVEEDKKHERHPIFGNIVDEVAYHEKYPTIYHLRKKLADSTEKADLRLIYL | |
| | ALAHMIKFRGHFLIEGDLNSDNSDVDKLFIQLVQTYNQLFEENPINEEGVDA | |
| | KAILSARLSKSRRLENLIAQLPGEKKNGLFGNLIALSLGLTPNFKSNFDLAE | |
| | DAKLQLSKDTYDEDLDNLLAQIGDQYADLFLAAKNLSDAILLSDILRVNSEI | |
| | TKAPLSASMIKRYDEHHQDLTLLKALVRQQLPEKYKEIFFDKSKNGYAGYID | |
| | GGASQEEFYKFIKPILEKMDGTEELLAKLNREDFLRKQRTFDNGSIPHQIHL | |
| | GELHAILRRQEEFYPFLKENREKIEKILTFRIPYYVGPLARGNSRFAWMTRK | |
| | SEETITPWNFEEVVDKGASAQAFIERMTNFDKNLPTEKVLPKHSLLYEYFTV | |
| | YNELTKVKYVTEGMRKPEFLSGEQKKEIVDLLFKKNRKVTVKQLKEDYFKKI | |
| | ECFDSVEISGVEDRFNASLGTYHDLLKIIKDKEFLDNEENEDILEDIVLTLT | |
| | LFEDKEMIEERLKKYANLFDDKVLKQLKRRRYTGWGRLSKKLINGIRDKQSG | |
| | KTILDFLKSDGFANRNFMQLIHDDSLTFKEEIKKAQVKGQGDSLHEQIANLA | |
| | GSPAIKKGILQTVKIVDEIVKVMGRHKPENIVIEMARENQTTQKGQKNSRER | |
| | MKRLEEGIKELGSQILKEHPVENTQLQNEKLYLYYLQNGKDMYTGQELDIDR | |
| | LSDYDVDHIIPQSFIKDDSIDNKVLTSSKEARGKSDNVPSEEVVKKMKSYWR | |
| | QLLNAKLISQRKFDNLTKAERGGLSELDKAGFIKRQLVETRQITKHVAQILD | |
| | SRMNTKYDENDKLIRDVKIITLKSKLVSDFRKDFQFYKVREINNYHHAHDAY | |
| | LNAVVGTALIKKYPKLESEFVYGDYKVYDVRKMIAKSEQEIGKATAKRFFYS | |
| | NIMNFFKTEITLANGEIRKRPLIETNEETGEIVWDKEKDFATVRKVLSMPQV | |
| | NIVKKTEVQTGGFSKESILPKRNSDKLIARKKDWDTKKYGGFDSPTVAYSVL | |
| | VVAKVEKGKSKKLKSVKELVGITIMERSSFEKDPVAFLEAKGYKEIQKDLII | |
| | KLPKYSLFELENGRKRLLASAGELQKGNELALPSKYVTFLYLASHYEKLKGS | |
| | PEDNEQKQLFVEQHRHYLDEIVDQISEFSKRYILADANLDKVLSLYNKHRDK | |
| | PIREQAENIINLETLTNLGAPAAFKFFDTTIDRKRYTSTKEILDATLIHQSI | |
| | TGLYETRIDLSQLGGD | |
| CasEnd-42 | MDKKYSIGLDIGTNSVGWAVITDEYKVPSKKFKVLGNTDRQSIKKNLLGALL | 2 |
| | FDSGETAEATRLKRTARRRYTRRKNRIRYLQEIFAEEMAKVDDSFFHRLEES | |
| | FLVEEDKKHERHPIFGNIVDEVAYHEKYPTIYHLRKKLADSTEKADLRLIYL | |
| | ALAHIIKFRGHFLIEGDLNSENSDVQKLFIQLVQTYNQLFEENPINESGVDA | |
| | KAILSAKLSKSRRLENLIAQFPGEKKNGLFGNLIALSLGLTPNFKSNFDLAE | |
| | DAKLQLSKDTYDEDLDNLLAQIGDQYADLFLAAKNLSDAILLSDILTVNSEI | |
| | TKAPLSASMIKRYDEHHQDLTLLKALVRQQLPEKYKEIFFDKSKNGYAGYID | |
| | GGASQEEFYKFIKPILEKMDGTEELLAKLNREDFLRKQRTFDNGSIPHQIHL | |
| | GELHAILRRQEDFYPFLKENREKIEKILTFRIPYYVGPLARGNSRFAWMTRK | |
| | SEETITPWNFEEVVDKGASAQAFIERMTNFDKNLPNEKVLPKHSLLYEYFTV | |
| | YNELTKVKYVTEGMRKPEFLSGEQKKEIVDLLFKKNRKVTVKQLKEDYFKKI | |
| | ECFDSVEISGVEDRFNASLGTYHDLLKIIKDKDFLDNEENEDILEDIVLTLT | |
| | LFEDREMIEERLKKYAHLFDDKVLKQLKRRRYTGWGRLSKKLINGIRDKQSG | |
| | KTILDFLKSDGFANRNFMQLIHDDSLTFKEEIKKAQVSGQGDSLHEQIANLA | |
| | GSPAIKKGILQTVKIVDELVKVMGRHKPENIVIEMARENQTTQKGQKNSRER | |
| | MKRIEEGIKELGSQILKEHPVENTQLQNEKLYLYYLQNGKDMYTGQELDIDR | |
| | LSDYDVDHIIPQSFIKDDSIDNKVLTSSEKARGKSDNVPSEEVVKKMKNYWR | |
| | QLLNAKLISQRKFDNLTKAERGGLSELDKAGFIKRQLVETRQITKHVAQILD | |
| | SRMNTKRDENDKLIRDVKIITLKSKLVSDFRKDFQFYKVREINNYHHAHDAY | |
| | LNAVVGTALIKKYPKLESEFVYGDYKVYDVRKMIAKSEQEIGKATAKRFFYS | |
| | NIMNFFKTEIKLANGEIRKRPLIETNEETGEIVWDKGKDFATVRKVLSMPQV | |
| | NIVKKTEVQTGGFSKESILPKRNSDKLIARKKDWDTKKYGGFDSPTVAYSVL | |
| | VVAKVEKGKSKKLKTVKELVGITIMERSSFEKDPVAFLEAKGYKEIQKDLII | |
| | KLPKYSLFELENGRKRLLASAGELQKGNELALPSKYVTFLYLASHYEKLKGS | |
| | PEDNEKKQLYVEQHKHYFDEIVDQISEFSKRYILADKNLDKILSLYNNFEDK | |
| | PIREQAENFINLFTLTALGAPAAFKFFDTTIDRKRYTSTKEILNATLIHQSI | |
| | TGLYETRIDLSQLGGD | |
| CasEnd-43 | MDKKYSIGLDIGTNSVGWAVITDEYKVPSKKFKVLGNTDRKSIKKNLIGALL | 3 |
| | FDSGETAEATRLKRTARRRYTRRKNRIRYLQEIFASEMAKVDDSFFHRLEES | |
| | FLVEEDKSNERHPIFGNIVDEVAYHEKYPTIYHLRKKLVDSDEKADLRLIYL | |
| | ALAHMIKFRGHFLIEGDLNPDNSDVDKLFIQLVETYNQLFEEKPINASGVDA | |
| | KAILSAKLSKSRRLENLIAELPGEKKNGLFGNLIALSLGLTPNFKSNEDLSE | |
| | DAKLQLSKDTYDDDLENLLGQIGDQYADLFSAAKNLSDAILLSDILRVKTEI | |
| | TKAPLSASMIKRYDEHHQDLTLLKALVRQQLPEKYKEIFFDQSKNGYAGYID | |
| | GGASQEEFYKFIKKILEKMDGTEELLDKLNREDLLRKQRTFDNGSIPHQIHL | |
| | GELHAILRRQEKYYPFLKENREKIEKILTFRIPYYVGPLARGNSRFAWMTRK | |
| | SDETITPWNFDEVVDKGASAQSFIERMTNFDKNLPDEKVLPKHSLLYEYFTV | |
| | YNELTKVKYVTEGMRKPSFLSGEQKKAIVNLLFKKNRKVTVKQLKEYYFKEI | |
| | EEFDSVEISGVEDRFNASLGTYHDLLKIIKDKSFLDNEENEKILEDIVLTLT | |
| | LFEDREMIKKRLEKYANLFDKKVMKQLKRRRYTGWGRLSRKLINGIRDKQSG | |
| | KTILDFLKDDGFTNRNFMQLIHDDSLTFKDDIEKAQVSDQGESLHEHIANLA | |
| | GSPAIKKGILQTVKVVDELVKVMGRHKPENIVIEMARENQTTQKGQKNSRER | |
| | MKRIEEGIKELGSQILKEHPVENTQLQNEKLYLYYLQNGRDMYVDQELDINR | |
| | LSDYDVDHIVPQSFLKDDSIDNKVLTRSDKARGKSDNVPSEEVVKKMKNYWR | |
| | QLLNAKLITQRKFDNLTKAERGGLSELDKAGFIKRQLVETRQITKHVAQILD | |
| | SRMNTKYDENGKLIRDVKVITLKSKLVSDFRKDFQFYKVREINNYHHAHDAY | |
| | LNAVVGTALIKKYPKLESEFVYGDYKVYDVRKMIAKSEQEIGKATAKYFFYS | |
| | NIMNFFKSEITLANGEIRKRPLIETNGETGEIVWDKERDFATVRKVLSMPQV | |
| | NIVKKTEVQTGGFSKESILPKRDSDKLIARKKDWDPKKYGGFDSPTVAYSVL | |
| | VVAKVEKGKAKKLKTVKELLGITIMERSAFEKNPIAFLEAKGYKNVKKDLII | |
| | KLPKYSLFELENGRKRMLASAGELQKGNELALPSKYVNFLYLASHYEKLKGS | |
| | SEDNKQKQLYVEQHKEYLDEIIDQISEFSERVILADANLEKVLEAYDKHRDK | |
| | SIEEQAENIIHLFTLTNLGAPAAFKYFGTTIDRKRYTSTKEVLNATLIHQSI | |
| | TGLYETRIDLSQLGGD | |
| CasEnd-44 | MKKKYSIGLDIGTNSVGWAVITDEYKVPSKKFKVLGNTDRQSIKKNLLGALL | 4 |
| | FDSGETAEATRLKRTARRRYTRRKNRIRYLQEIFAEEMAKVDDSFFHRLEES | |
| | FLVEEDKKHERHPIFGNIVDEVAYHEKYPTIYHLRKKLADSTEKADLRLIYL | |
| | ALAHMIKFRGHFLIEGDLNSDNSDVDKLFIQLVQTYNQLFEENPINEEGVDA | |
| | KAILSAKLSKSRRLENLIAQLPGEKKNGLFGNLIALSLGLTPNFKSNEDLAE | |
| | DAKLQLSKDTYDEDLENLLAQIGDQYADLFLAAKNLSDAILLSDILTVNSEI | |
| | TKAPLSASMIKRYDEHHQDLTLLKALVRQQLPEKYKEIFFDESKNGYAGYID | |
| | GGASQEEFYKFIKPILEKMDGTEELLAKLNREDFLRKQRTFDNGSIPHQIHL | |
| | GELHAILRRQEDFYPFLKENREKIEKILTFRIPYYVGPLARGNSRFAWMTRK | |
| | SDETITPWNFEEVVDKGASAQAFIERMTNFDKNLPNEKVLPKHSLLYEYFTV | |
| | YNELTKVKYVTEGMRKPEFLSGEQKKEIVDLLFKKNRKVTVKQLKEDYFKKI | |
| | ECFDSVEISGVEDRFNASLGTYHDLLKIIKDKDFLDNEENEDILEDIVLTLT | |
| | LFEDKEMIEERLKKYANLFDDKVLKQLKRRRYTGWGRLSKKLINGIRDKQSG | |
| | KTILDFLKSDGFANRNFMQLIHDDSLTFKEEIKKAQVKGQGDSLHEQIANLA | |
| | GSPAIKKGILQTVKIVDELVKVMGRHKPENIVIEMARENQTTQKGQKNSRER | |
| | MKRIEEGIKELGSQILKEHPVENTQLQNEKLYLYYLQNGKDMYTGDELDIDR | |
| | LSDYDVDHIIPQSFIKDDSIDNKVLTSSEKARGKSDNVPSEEVVKKMKNYWR | |
| | QLLNAKLISQRKFDNLTKAERGGLSELDKAGFIKRQLVETRQITKHVAQILD | |
| | SRFNTERDENDKLIRDVKIITLKSKLVSDFRKDFQFYKVREINDYHHAHDAY | |
| | LNAVVGTALIKKYPKLESEFVYGDYKVYDVRKMIAKSEQEIGKATAKRFFYS | |
| | NIMNFFKTEITLANGEIRKRPLIETNEETGEIVWDKEKDFATVRKVLSMPQV | |
| | NIVKKTEVQTGGFSKESILPKRNSDKLIARKKDWDPKKYGGFDSPTVAYSVL | |
| | VVAKVEKGKSKKLKTVKELVGITIMERSSFEKDPVAFLEAKGYKEIQKDLII | |
| | KLPKYSLFELENGRKRLLASAGELQKGNELALPSKYVTFLYLASHYEKLKGS | |
| | PEDNEQKQLFVEQHKHYFDEILDQISEFSERYILADKNLEKILSLYNKNRDK | |
| | SISEQAESIINLFTLTALGAPAAFKFFDTTIDRKRYTSTKEILDATLIHQSI | |
| | TGLYETRIDLSQLGGD | |
| CasEnd-45 | MDKKYSIGLDIGTNSVGWAVITDEYKVPSKKFKVLGNTDRHSIKKNLIGALL | 5 |
| | FDSGETAEATRLKRTARRRYTRRKNRICYLQEIFSNEMAKVDDSFFHRLEES | |
| | FLVEEDKKHERHPIFGNIVDEVAYHEKYPTIYHLRKKLADSTEKADLRLIYL | |
| | ALAHIIKFRGHFLIEGDLNSDNSDVQKLFIQLVQTYNQLFEENPLDEETVDA | |
| | KAILTAKLSKSRRLENLIAQLPGEKKNGLFGNLIALSLGLTPNFKSNEDLSE | |
| | DAKLQLSKDTYDEDLDNLLGQIGDQYADLFLAAKNLSDAILLSGILTVNDEI | |
| | TKAPLSASMIKRYDEHHQDLTLLKALVRQQLPEKYKEIFFDKSKNGYAGYID | |
| | GGASQEEFYKYIKPILEKMDGAEELLAKINREDFLRKQRTFDNGSIPHQIHL | |
| | GELHAILRRQEKFYPFLKENREKIEKILTFRIPYYVGPLARGNSRFAWMTRK | |
| | SDETITPWNFEEVVDKEASAQAFIERMTNFDKNLPNEKVLPKHSLLYEYFTV | |
| | YNELTKVKYVTEGMGKPEFFSGEQKQEIVDLLFKKNRKVTVKQLKEFLFKEI | |
| | ECFDSVEISGVEDRFNASLGTYHDLLKIIKDKEFLDNEENEDILEDIVLTLT | |
| | LFEDREMIEERLKKYANLFDKKVLKKLKRRRYTGWGRLSRKLINGIRDKQSG | |
| | KTILDFLKSDGFANRNFMQLIHDDSLSFKEEIQKAQVSGQGDSLHEHIANLA | |
| | GSPAIKKGILQTVKVVDELVKVMGRHKPENIVIEMARENQTTQKGQKNSRER | |
| | MKRLEEGLKELGSQILKEHPVENTQLQNDKLYLYYLQNGKDMYTGEELDIDR | |
| | LSDYDVDHIIPQSFIKDDSIDNKVLTSSAKARGKSDNVPSEEVVKKMKSYWR | |
| | QLLNAKLISQRKFDNLTKAERGGLSELDKAGFIKRQLVETRQITKHVAQILD | |
| | SRMNTKYDENDKLIREVKVITLKSKLVSDFRKDFQFYKVREINNYHHAHDAY | |
| | LNAVVGTALIKKYPKLESEFVYGDYKVYDVRKMIAKSEQEIGKATAKYFFYS | |
| | NIMNFFKTEITLANGEIRKRPLIETNGETGEIVWDKGRDFATVRKVLSMPQV | |
| | NIVKKTEVQTGGFSKESILPKRNSDKLIARKKDWDTKKYGGFDSPTVAYSVL | |
| | VVAKIEKGKAKKLKTVKELVGITIMERSSFEKDPVAFLEAKGYKNIQKDLII | |
| | KLPKYSLFELENGRKRLLASAGELQKGNELALPNKYVTLLYHAKHYEKLKGS | |
| | PEDNEKHLEYVEQHRHEFDEILEQISEFSERYILADKNLEKILELYNKNEDY | |
| | SISELAESFINLFTLTALGAPAAFKFFGTTIDRKRYTSTKEILDATLIHQSI | |
| | TGLYETRIDLSQLGGD | |
| CasEnd-46 | MDKKYSIGLDIGTNSVGWAVITDEYKVPSKKFKVLGNTDRHSIKKNLIGALL | 6 |
| | FDSGETAEATRLKRTARRRYTRRKNRICYLQEIFSNEMAKVDDSFFHRLEES | |
| | FLVEEDKRHERHPIFGNIVDEVAYHEKYPTIYHLRKHLADSTEKADLRLIYL | |
| | ALAHIIKFRGHFLIEGDLNSDNSDVDKLFIQLVQTYNQLFEENPINEEGVDA | |
| | KAILTEKLSKSRRLENLIAQFPGEKRNGLFGNLIALSLGLTPNFKSNFGLAE | |
| | DAKLQLSKDTYDEDLENLLAQIGDQYADLFLAAKNLSDAILLSDILTVNSEI | |
| | TKAPLSASMIKRYDEHHQDLTLLKALVRQQLPEKYKEIFFDKSKNGYAGYID | |
| | GGASQEEFYKYIKPILEKMDGSEYFLAKINREDFLRKQRTFDNGSIPHQIHL | |
| | GELHAILRRQEDFYPFLKENREKIEKILTFRIPYYVGPLARGNSRFAWMTRK | |
| | SDETITPWNFEEVVDKEASAQAFIERMTNFDKNLPSEKVLPKHSLLYEYFTV | |
| | YNELTKVKYVTEGMGKPEFFSAEQKQEIVDLLFKKNRKVTVKRLKEFLFKEI | |
| | ECFRSVEISGVEDAFNASLGTYHDLLKIIKDKDELDNEENEKILEDIVLTLT | |
| | LFEDREMIEERLEKYANLFDKKVLKKLKRRRYTGWGRLSKKLINGIRDKQSG | |
| | KTILDFLKSDGFANRNFMQLIHDDSLTFKDEIKKAQVSGQGDSLHEHIANLA | |
| | GSPAIKKGILQTVKVVDELVKVMGRHKPENIVIEMARENQTTQKGQKNSRER | |
| | MKRIEEGIKELGSQILKEHPVENTQLQNEKLYLYYLQNGRDMYVDQELDINR | |
| | LSDYDVDHIVPQSFLKDDSIDNKVLTRSDKARGKSDNVPSEEVVKKMKNYWR | |
| | QLLNAKLITQRKFDNLTKAERGGLSELDKAGFIKRQLVETRQITKHVAQILD | |
| | SRMNTKYDENDKLIREVKVITLKSKLVSDFRKDFQFYKVREINNYHHAHDAY | |
| | LNAVVGTALIKKYPKLESEFVYGDYKVYDVRKMIAKSEQEIGKATAKYFFYS | |
| | NIMNFFKTEITLANGEIRKRPLIETNGETGEIVWDKGRDFATVRKVLSMPQV | |
| | NIVKKTEVQTGGFSKESILPKRNSDKLIARKKDWDPKKYGGFDSPTVAYSVL | |
| | VVAKVEKGKSKKLKSVKELLGITIMERSSFEKNPIDFLEAKGYKEVKKDLII | |
| | KLPKYSLFELENGRKRMLASAGELQKGNELALPSKYVNFLYLASHYEKLKGS | |
| | PEDNEQKQLFVEQHKHYLDEIIEQISEFSKRVILADANLDKVLSAYNKHRDK | |
| | PIREQAENIIHLFTLTNLGAPAAFKYFDTTIDRKRYTSTKEVLDATLIHQSI | |
| | TGLYETRIDLSQLGGD | |
| CasEnd-47 | MDKKYSIGLDIGTNSVGWAVITDEYKVPSKKFKVLGNTDRHSIKKNLLGALL | 7 |
| | FDSGETAEATRLKRTARRRYTRRKNRIRYLQEIFSEEMAKVDDSFFHRLEES | |
| | FLVEEDKKHERHPIFGNIVDEVAYHENYPTIYHLRKKLADSTEKADLRLIYL | |
| | ALAHIIKFRGHFLIEGDLNPENSDVQKLFIQLVQTYNQLFEENPINESGVDA | |
| | KAILSARLSKSRRLENLIAQLPGEKKNGLFGNLIALSLGLTPNFKSNEDLAE | |
| | DAKLQLSKDTYDDDLDNLLAQIGDQYADLFLAAKNLSDAILLSDILTVNDEI | |
| | TKAPLSASMIKRYDEHHQDLTLLKALVRQQLPEKYKEIFFDKSKNGYAGYID | |
| | GGASQEEFYKFIKPILEKMDGTEELLAKINREDFLRKQRTFDNGSIPHQIHL | |
| | GELHAILRRQEDFYPFLKENREKIEKILTFRIPYYVGPLARGNSRFAWMTRK | |
| | SEETITPWNFEEVVDKGASAQAFIERMTNFDKNLPNEKVLPKHSLLYEYFTV | |
| | YNELTKVKYVTEGMRKPEFLSGEQKKEIVDLLFKKNRKVTVKQLKEDYFKKI | |
| | ECFDSVEISGVEDRFNASLGTYHDLLKIIKDKDFLDNEENEDILEDIVLTLT | |
| | LFEDREMIEERLEKYAHLFDKKVLKQLKRRRYTGWGRLSRKLINGIRDKQSG | |
| | KTILDFLKSDGFANRNFMQLIHDDSLTFKEEIKKAQVIGQGDSLHEQIANLA | |
| | GSPAIKKGILQSIKIVDELVKVMGRHKPENIVIEMARENQTTQKGQKNSRER | |
| | MKRIEEGIKELGSQILKEHPVENTQLQNEKLYLYYLQNGRDMYVDQELDINR | |
| | LSDYDVDHIVPQSFLKDDSIDNKVLTRSDKARGKSDNVPSEEVVKKMKNYWR | |
| | QLLNAKLITQRKFDNLTKAERGGLSELDKAGFIKRQLVETRQITKHVAQILD | |
| | SRFNTKYDENDKLIREVKIITLKSKLVSDFRKDFQFYKVREINDYHHAHDAY | |
| | LNAVVGTALIKKYPKLESEFVYGDYKVYDVRKMIAKSEQEIGKATAKYFFYS | |
| | NIMNFFKTEITLANGEIRKRPLIETNEETGEIVWDKEKDFATVRKVLSMPQV | |
| | NIVKKTEVQTGGFSKESILPKRNSDKLIARKKDWDTKKYGGFDSPTVAYSVL | |
| | VVAKVEKGKSKKLKTVKELVGITIMERSSFEKDPIDFLEAKGYKNIQKDLII | |
| | KLPKYSLFELENGRKRMLASAGELQKGNELALPQKYVTLLYLASHYEKLKGS | |
| | PEDNSQKLEYVEQHRYYFDEIFEQISEFSERYILADKNLDKVKSLYNNHRDK | |
| | PIREQAENFIHLFTFTSLGAPAAFKFFDTTIDRKRYTSTTEVLDATLIHQSI | |
| | TGLYETRIDLSQLGGD | |
| CasEnd-48 | MDKKYSIGLDIGTNSVGWAVITDEYKVPSKKFKVLGNTDRHSIKKNLIGALL | 00 |
| | FDSGETAEATRLKRTARRRYTRRKNRIRYLQEIFANEMAKVDDSFFHRLEES | |
| | FLVEEDKKHERHPIFGNIVDEVAYHEKYPTIYHLRKKLVDSDEKADLRLIYL | |
| | ALAHMIKFRGHFLIEGDLNSDNSDVQKLFIQLVQTYNQLFEESPIEAEKVDA | |
| | KAILSAKLSKSRRLENLIAQLPGEKKNGLFGNLIALSLGLTPNFKSNFDLAE | |
| | DAKLQLSKDTYDDDLENLLGQIGDQYADLFLAAKNLSDAILLSGILRVNTEI | |
| | TKAPLSASMIKRYDEHHQDLTLLKQLVRQQLPEKYKEIFFDQSKNGYAGYID | |
| | GGASQEEFYKYIKPILEKMDGTEELLAKLEREDLLRKQRTFDNGSIPHQIHL | |
| | GELHAILRRQEKYYPFLKENREKIEKILTFRIPYYVGPLARGNSRFAWMTRK | |
| | SDETITPWNFEEVVDKGASAQKFIERMTNFDKNLPNEKVLPKHSLLYEYFTV | |
| | YNELTKVKYVTEGMRKPEFLSGEQKKEIVDLLFKKNRKVTVKQLKEDYFKKI | |
| | ECFDSVEISGVEDRFNASLGTYHDLLKIIKDKDELDNEENEDILEDIVLTLT | |
| | LFEDREMIKERLEKYADLFDKKVMKQLKRRRYTGWGRLSKKLINGIRDKQSG | |
| | KTILDFLKADGFANRNFMQLIHDDSLTFKEEIQKAQVSGQGDSLHEHIANLA | |
| | GSPAIKKGILQTVKVVDELVKVMGRHKPENIVIEMARENQTTQKGQKNSRER | |
| | MKRIEEGIKELGSQILKEHPVENTQLQNEKLYLYYLQNGRDMYVDQELDINR | |
| | LSDYDVDHIVPQSFLKDDSIDNKVLTRSDKARGKSDNVPSEEVVKKMKNYWR | |
| | QLLNAKLITQRKFDNLTKAERGGLSELDKAGFIKRQLVETRQITKHVAQILD | |
| | SRMNTEYDENDKLIRDVKVITLKSKLVSDFRKDFGFYKVREINNYHHAHDAY | |
| | LNAVVGTALIKKYPKLESEFVYGDYKVYDVRKMIAKSEQEIGKATAKYFFYS | |
| | NIMNFFKSEITLANGEIRKRPLIETNEETGEIVWDKEKDFATVRKVLSMPQV | |
| | NIVKKTEVQTGGFSKESILPKRDSDKLIARKKDWDPKKYGGFDSPTVAYSVL | |
| | VVAKVEKGKTKKLKTVKELLGITIMERSAFEKNPVDFLEAKGYKEVKKDLII | |
| | KLPKYSLFELENGRKRMLASAGELQKGNELALPSKYVNFLYLASHYEKLKGK | |
| | PEDNEQKQLFVEQHKEYLDEIIDQISEFSKRVILADANLEKVKSAYNKHRDK | |
| | SIEEQAENIIHLFTLTALGAPAAFKYFDTTIDRKRYTSTKEVLNATLIHQSI | |
| | TGLYETRIDLSQLGGD | |
| CasEnd-49 | MDKKYSIGLDIGTNSVGWAVITDEYKVPSKKFKVLGNTDRHSIKKNLIGALL | 9 |
| | FDSGETAEATRLKRTARRRYTRRKNRIRYLQEIFSEEMAKVDDSFFHRLEES | |
| | FLVEEDKKNERHPIFGNIVDEVAYHEKYPTIYHLRKKLADSDEKADLRLIYL | |
| | ALAHMIKFRGHFLIEGDLNSDNSDVQKLFIQLVQTYNQLFEENPLNEIGVDA | |
| | KAILTARLSKSRRLENLIAQFPGEKKNGLFGNLIALSLGLTPNFKSNFDLSE | |
| | DAKLQLSKDTYDEDLENLLAQIGDQYADLFLAAKNLSDAILLSDILTVNDEI | |
| | TKAPLSASMVKRYDEHHQDLTLLKALVRQQLPEKYKEIFFDQSKNGYAGYID | |
| | GGASQEEFYKYLKPILEKMDGSEEFLEKINREDFLRKQRTFDNGSIPHQIHL | |
| | GELHAILRRQEKYYPFLKENREKIEKILTFRIPYYVGPLARGNSRFAWMTRK | |
| | SDETITPWNFEEVVDKEASAQSFIERMTNFDKNLPNEKVLPKHSLLYEKFTV | |
| | YNELTKVKYVTEGMRKPEFLSGEQKQEIVDLLFKKNRKVTVKQLKEDYFKKI | |
| | ECFDSVEISGVEDRFNASLGTYHDLLKIIKDKDFLDNEENEDILEDIVLTLT | |
| | LFEDREMIEERLKKYANLFDDKVLKQLKRRRYTGWGRLSKKLINGIRDKQSG | |
| | KTILDFLKADGFANRNFMQLIHDDSLTFKEEIEKAQVSGQGESLHELIANLA | |
| | GSPAIKKGILQTIKIVDELVKVMGRHAPENIVIEMARENQTTQKGQKNSRER | |
| | MKRLEEGIKELGSKILKEHPVENTQLQNEKLYLYYLQNGKDMYTGEELDIDR | |
| | LSDYDVDHIVPQSFLKDDSIDNKVLTSSAKARGKSDNVPSEEVVKKMKNYWR | |
| | KLLDAKLITQRKFDNLTKAERGGLTELDKAGFIKRQLVETRQITKHVAQILD | |
| | SRFNTKYDENDKLIRDVKIITLKSKLVSDFRKDFQFYKVREINNYHHAHDAY | |
| | LNAVVGTALIKKYPKLESEFVYGDYKVYDVRKMIAKSEQEIGKATAKYFFYS | |
| | NIMNFFKTEITLANGEIRKRPLIETNGETGEIVWDKGKDFATVRKVLSMPQV | |
| | NIVKKTEVQTGGFSKESILPKRNSDKLIARKKDWDPKKYGGFDSPTVAYSVL | |
| | VVAKVEKGKAKKLKTVKELVGITIMERSSFEKNPVDFLEAKGYKEVKKDLII | |
| | KLPKYSLFELENGRKRLLASAGELQKGNELALPQKYVEFLYLASHYEKLKGS | |
| | PEDNEQKQLFVEQHKHYFDEIIEQISEFSKRYILADANLEKILSLYEKNRDK | |
| | PIEEQAESFINLFTLTALGAPAAFKFFDTTIDRKRYTSTKEILDATLIHQSI | |
| | TGLYETRIDLSQLGGD | |
| CasEnd-50 | MDKKYSIGLDIGTNSVGWAVITDEYKVPSKKFKVLGNTDRQSIKKNLIGALL | 10 |
| | FDSGETAEATRLKRTARRRYTRRKNRIRYLQEIFSEEMAKVDDSFFHRLEES | |
| | FLVEEDKKHERHPIFGNIVDEVAYHEKYPTIYHLRKKLADSTEKADLRLIYL | |
| | ALAHMIKFRGHFLIEGDLNSDNSDVDKLFIQLVQTYNQLFEENPINESGVDA | |
| | KAILSAKLSKSRRLENLIAQLPGEKKNGLFGNLIALSLGLTPNFKSNEDLAE | |
| | DAKLQLSKDTYDEDLDNLLAQIGDQYADLFLAAKNLSDAILLSDILTVNSEI | |
| | TKAPLSASMIKRYDEHHQDLTLLKALVRQQLPEKYKEIFFDKSKNGYAGYID | |
| | GGASQEEFYKFIKPILEKMDGTEELLAKLNREDFLRKQRTFDNGSIPHQIHL | |
| | GELHAILRRQEDFYPFLKENREKIEKILTFRIPYYVGPLARGNSRFAWMTRK | |
| | SEETITPWNFEEVVDKGASAQAFIERMTNFDKNLPNEKVLPKHSLLYEYFTV | |
| | YNELTKVKYVTEGMRKPEFLSGEQKKEIVDLLFKKNRKVTVKQLKEDYFKKI | |
| | ECFDSVEISGVEDRFNASLGTYHDLLKIIKDKDFLDNEENEDILEDIVLTLT | |
| | LFEDREMIEERLKKYANLFDDKVLKQLKRRRYTGWGRLSKKLINGIRDKQSG | |
| | KTILDFLKSDGFANRNFMQLIHDDSLTFKEEIQKAQVSGQGDSLHEQIANLA | |
| | GSPAIKKGILQTVKIVDEIVKVMGRHKPENIVIEMARENQTTQKGQKNSRER | |
| | MKRLEEGIKELGSQILKEHPVENTQLQNEKLYLYYLQNGKDMYTGEELDIDR | |
| | LSDYDVDHIIPQSFIKDDSIDNKVLTSSDEARGKSDNVPSEEVVKKMKSYWR | |
| | QLLKAKLISQRKFDNLTKAERGGLSELDKAGFIKRQLVETRQITKHVAQILD | |
| | SRFNTERDENDKLIRDVKIITLKSKLVSDFRKDFQFYKVREINDYHHAHDAY | |
| | LNAVVGTALIKKYPKLESEFVYGDYKVYDVRKMIAKSEQEIGKATAKRFFYS | |
| | NIMNFFKTEIKLANGEIRKRPLIETNEETGEIVWDKEKDFATVRKVLSMPQV | |
| | NIVKKTEVQTGGFSKESILPKRESDKLIARKKDWDTKKYGGFDSPTVAYSVL | |
| | VVAKVEKGKTKKLKTVKELVGITIMERSSFEKDPIDFLEAKGYKEVQKDLII | |
| | KLPKYSLFELENGRKRLLASAGELQKGNELALPSKYVTFLYLASHYEKLKGS | |
| | PEDEEQKQLYVEQHKHYFDEIVEQISEFSKRYILADKNLDKILSLYNKHRDK | |
| | SISEQAESIINLFTLTALGAPAAFKFFDTTIDRKRYTSTKEILNSTLIHQSI | |
| | TGLYETRIDLSQLGGD | |
| CasEnd-51 | MDKKYSIGLDIGTNSVGWAVITDEYKVPSKKFKVLGNTDRQSIKKNLLGALL | 11 |
| | FDSGETAEATRLKRTARRRYTRRKNRIRYLQEIFAEEMAKVDDSFFHRLEES | |
| | FLVEEDKKHERHPIFGNIVDEVAYHEKYPTIYHLRKELADSTEKADLRLIYL | |
| | ALAHMIKFRGHFLIEGDLNSDNSDVDKLFIQLVQTYNQLFEENPINEEGVDA | |
| | KAILSAKLSKSRRLENLIAQLPGEKKNGLFGNLIALSLGLTPNFKSNEDLAE | |
| | DAKLQLSKDTYDEDLDNLLAQIGDQYADLFLAAKNLSDAILLSDILTVNSEI | |
| | TKAPLSASMIKRYDEHHQDLTLLKALVRQQLPEKYKEIFFDQSKNGYAGYID | |
| | GGASQEDFYKFIKPILEKMDGTEELLAKLNREDFLRKQRTFDNGSIPHQIHL | |
| | GELHAILRRQEEFYPFLKENREKIEKILTFRIPYYVGPLARGNSRFAWMTRK | |
| | SEETITPWNFEEVVDKGASAQSFIERMTNFDKNLPNEKVLPKHSLLYEYFTV | |
| | YNELTKVKYVTEGMRKPEFLSGEQKEEIVDLLFKKNRKVTVKQLKEDYFKKI | |
| | ECFDSVEISGVEDRFNASLGTYHDLLKIIKDKDFLDNEENEDILEDIVLTLT | |
| | LFEDKEMIEERLKKYAHLFDDKVMKQLKRRRYTGWGRLSRKLINGIRDKQSG | |
| | KTILDFLKSDGFANRNFMQLIHDDSLTFKEEIKKAQVSGQGDSLHEQIANLA | |
| | GSPAIKKGILQTVKIVDELVKVMGRHKPENIVIEMARENQTTQKGQKNSRER | |
| | MKRLEEGIKELGSQILKEHPVENTQLQNEKLYLYYLQNGKDMYTGEELDIDR | |
| | LSDYDVDHIVPQSFIKDDSIDNKVLTSSKEARGKSDNVPSEEVVKKMKNYWR | |
| | QLLKAKLISQRKFDNLTKAERGGLSELDKAGFIKRQLVETRQITKHVAQILD | |
| | SRMNTERDENDKLIRDVKIITLKSKLVSDFRKDFQFYKVREINNYHHAHDAY | |
| | LNAVVGTALIKKYPKLESEFVYGDYKVYDVRKMIAKSEQEIGKATAKRFFYS | |
| | NIMNFFKTEIKLANGEIRKRPLIETNEETGEIVWDKEKDFATVRKVLSMPQV | |
| | NIVKKTEVQTGGFSKESILPKRNSDKLIARKKDWDPKKYGGFDSPTVAYSVL | |
| | VVAKVEKGKSKKLKTVKELVGITIMERSSFEKDPVAFLEKKGYKEVQKDLII | |
| | KLPKYSLFELENGRKRLLASAGELQKGNELALPSKYVTFLYLASHYEKLKGS | |
| | PEDNEQKQLYVEQHKHYLDEILDQISEFSKRYILADKNLEKILSLYNKNEDK | |
| | SIEEQAENIINLFTLTNLGAPAAFKFFDTTIDRKRYTSTKEILDATLIHQSI | |
| | TGLYETRIDLSQLGGD | |
| CasEnd-52 | MDKKYSIGLDIGTNSVGWAVITDEYKVPSKKFKVLGNTDRQSIKKNLLGALL | 12 |
| | FDSGETAEATRLKRTARRRYTRRKNRIRYLQEIFSNEMAKVDDSFFHRLEES | |
| | FLVEEDKKHERHPIFGNIVDEVAYHEKYPTIYHLRKKLADSTEKADLRLIYL | |
| | ALAHMIKFRGHFLIEGDLNPDNSDVDKLFIQLVQTYNQLFEENPINESGVDA | |
| | KAILSAKLSKSRRLENLIAQLPGEKKNGLFGNLIALSLGLTPNFKSNFDLAE | |
| | DAKLQLSKDTYDDDLDNLLAQIGDQYADLFLAAKNLSDAILLSDILTVNSEI | |
| | TKAPLSASMIKRYDEHHQDLTLLKALVRQQLPEKYKEIFFDQSKNGYAGYID | |
| | GGASQEEFYKYIKPILEKMDGTEELLAKLNREDLLRKQRTFDNGSIPHQIHL | |
| | GELHAILRRQEDFYPFLKENREKIEKILTFRIPYYVGPLARGNSRFAWMTRK | |
| | SEETITPWNFEEVVDKGASAQAFIERMTNFDKNLPNEKVLPKHSLLYEYFTV | |
| | YNELTKVKYVTEGMRKPEFLSGEQKEEIVDLLFKKNRKVTVKQLKEDYFKKI | |
| | ECFDSVEISGVEDRFNASLGTYHDLLKIIKDKDFLDNEENEDILEDIVLTLT | |
| | LFEDKEMIEERLKKYANLFDDKVMKQLKRRRYTGWGRLSRKLINGIRDKQSG | |
| | KTILDFLKSDGFANRNFMQLIHDDSLTFKEEIQKAQVSGQGDSLHEQIANLA | |
| | GSPAIKKGILQTVKIVDEIVKVMGRHKPENIVIEMARENQTTQKGQKNSRER | |
| | MKRLEEGIKELGSQILKEHPVENTQLQNEKLYLYYLQNGKDMYTGDELDIDR | |
| | LSDYDVDHIIPQSFIKDDSIDNKVLTSSEKARGKSDNVPSEEVVKKMKNYWR | |
| | QLLNAKLISQRKFDNLTKAERGGLSELDKAGFIKRQLVETRQITKHVAQILD | |
| | SRMNTEYDENDKLIRDVKIITLKSKLVSDFRKDFQFYKVREINDYHHAHDAY | |
| | LNAVVGTALIKKYPKLESEFVYGDYKVYDVRKMIAKSEQEIGKATAKRFFYS | |
| | NIMNFFKTEITLANGEIRKRPLIETNEETGEIVWDKEKDFATVRKVLSMPQV | |
| | NIVKKTEVQTGGFSKESILPKRNSDKLIARKKDWDPKKYGGFDSPTVAYSVL | |
| | VVAKVEKGKSKKLKTVKELVGITIMERSSFEKDPVDFLEAKGYKEIQKDLII | |
| | KLPKYSLFELENGRKRLLASAGELQKGNELALPSKYVTFLYLASHYEKLKGS | |
| | PEDNEQKQLFVEQHRHYFDEILEQISEFSERYILADKNLDKVLSLYNNFRDK | |
| | SIEEQAENIINLFTLTNLGAPAAFKFFDTTIDRKRYTSTKEVLDSTLIHQSI | |
| | TGLYETRIDLSQLGGD | |
| CasEnd-53 | MDKKYSIGLDIGTNSVGWAVITDEYKVPSKKFKVLGNTDRHSIKKNLIGALL | 13 |
| | FDSGETAEATRLKRTARRRYTRRKNRICYLQEIFSNEMAKVDDSFFQRLEES | |
| | FLVEEDKKNERHPIFGNIADEVAYHEKYPTIYHLRKKLADSTEKADLRLIYL | |
| | ALAHMIKFRGHFLIEGDLNSDNSDVQKLFIQLVQTYNQLFEESPLNEEGVDA | |
| | KAILTEKLSKSRRLENLIAQFPGEKKNGLFGNLIALSLGLTPNFKSNEDLAE | |
| | DAKLQLSKDTYDEDLENLLGQIGDQYADLFLAAKNLYDAILLSDILTVNDEI | |
| | TKAPLSASMVKRYDEHHQDLKLLKKFVRQQLPEKYKEIFSDKSKNGYAGYID | |
| | GKTSQEEFYKYLKPILEKMDGSEEFLEKIEREDFLRKQRTFDNGSIPHQIHL | |
| | QELHAILRRQEKYYPFLKENREKIEKILTFRIPYYVGPLARGNSRFAWMSRK | |
| | SDEKITPWNFDEVVDKEASAQKFIERMTNNDLYLPDEKVLPKHSLLYEKFTV | |
| | YNELTKVKYVTEGMRKPEFLSAEQKQEIVDLLFKKNRKVTKKKLKEYYFKEF | |
| | ECFDSVEITGVDDRFNASLGTYHDLLKIIKDKDFLDNEENEKILEDIVLTLT | |
| | LFEDREMIKERLEKYANLFDKKQLKQLKRRHYTGWGRLSAKLINGIRDKQSG | |
| | KTILDYLIDDGFANRNFMQLIHDDSLTFKEEIQKAQVSGDGDSLHEHIANLA | |
| | GSPAIKKGILQTVKVVDELVKVMGRHKPENIVIEMARENQTTQKGQRNSRQR | |
| | LKRLEEAIKELGSKILKEHPVENSQLQNDRLYLYYLQNGKDMYTGEELDIDR | |
| | LSQYDIDHIIPQSFIKDDSIDNRVLVSSAKARGKSDNVPSEEVVKKMKNYWK | |
| | QLLDAKLISQRKFDNLTKAERGGLSELDKAGFIKRQLVETRQITKHVAQILD | |
| | SRMNTKYDENDKLIREVKVITLKSKLVSDFRKDFQFYKVREINNYHHAHDAY | |
| | LNAVVGTALIKKYPKLESEFVYGDYKVYDVRKMIAKSEQEIGKATAKYFFYS | |
| | NIMNFFKTEITLANGEIRKRPLIETNGETGEIVWDKGRDFATVRKVLSMPQV | |
| | NIVKKTEVQTGGFSKESILPKRNSDKLIARKKDWDPKKYGGFDSPTVAYSVL | |
| | VVAKVEKGKSKKLKSVKELLGITIMERSSFEKNPIDFLEAKGYKEVKKDLII | |
| | KLPKYSLFELENGRKRMLASAGELQKGNELALPSKYVNFLYLASHYEKLKGS | |
| | PEDNEQKQLFVEQHKHYLDEIIEQISEFSKRVILADANLDKVLSAYNKHRDK | |
| | PIREQAENIIHLFTLTNLGAPAAFKYFDTTIDRKRYTSTKEVLDATLIHQSI | |
| | TGLYETRIDLSQLGGD | |
| CasEnd-54 | MKKKYSIGLDIGTNSVGWAVITDEYKVPSKKFKVLGNTDRHSIKKNLIGALL | 14 |
| | FDSGETAEATRLKRTARRRYTRRKNRIRYLQEIFSEEMAKVDDSFFHRLEES | |
| | FLVEEDKKHERHPIFGNIVDEVAYHEKYPTIYHLRKELVDSTEKADLRLIYL | |
| | ALAHMIKFRGHFLIEGDLNSENSDVQKLFIQLVQTYNQLFEENPLNEEGVDA | |
| | KAILSAKLSKSRRLENLIAQFPGEKKNGLFGNLIALSLGLTPNFKSNEDLAE | |
| | DAKLQLSKDTYDDDLENLLGQIGDQYADLFLAAKNLSDAILLSDILRVNTEI | |
| | TKAPLSASMIKRYDEHHQDLTLLKALVRKQLPEKYKEIFFDKSKNGYAGYID | |
| | GGASQEEFYKFIKPILEKMDGTEELLAKLNREDLLRKQRTFDNGSIPHQIHL | |
| | GELHAILRRQEEFYPFLKENREKIEKILTFRIPYYVGPLARGNSRFAWMTRK | |
| | SEETITPWNFEEVVDKGASAQSFIERMTNFDKNLPNEKVLPKHSLLYEYFTV | |
| | YNELTKVKYVTEGMGKPEFLSGEQKKEIVDLLFKKNRKVTVKQLKEDYFKKI | |
| | ECFDSVEISGVEDRFNASLGTYHDLLKIIKDKDFLDNEENEDILEDIVLTLT | |
| | LFEDREMIEERLKKYANLFDKKVMKQLKRRRYTGWGRLSRKLINGIRDKQSG | |
| | KTILDFLKSDGFANRNFMQLIHDDSLTFKEEIEKAQVSGQGDSLHEQIANLA | |
| | GSPAIKKGILQTVKVVDELVKVMGRHKPENIVIEMARENQTTQKGQKNSRER | |
| | MKRIEEGIKELGSQILKEHPVENTQLQNEKLYLYYLQNGRDMYTGEELDINR | |
| | LSDYDVDHIVPQSFLKDDSIDNKVLTRSKKARGKSDNVPSEEVVKKMKSYWR | |
| | QLLKAKLITQRKFDNLTKAERGGLSELDKAGFIKRQLVETRQITKHVAQILD | |
| | SRMNTKRDENDKLIRDVKVITLKSKLVSDFRKDFQFYKVREINNYHHAHDAY | |
| | LNAVVGTALIKKYPKLESEFVYGDYKVYDVRKMIAKSEQEIGKATAKYFFYS | |
| | NIMNFFKSEIKLANGEIRKRPLIETNEETGEIVWDKERDFATVRKVLSMPQV | |
| | NIVKKTEVQTGGFSKESILPKRNSDKLIARKKDWDPKKYGGFDSPTVAYSVL | |
| | VVAKIEKGKSKKLKTVKELLGITIMERSSFEKDPVAFLEAKGYKEVKKDLII | |
| | KLPKYSLFELENGRKRMLASAGELQKGNELALPSKYVNFLYLASHYEKLKGS | |
| | PEDNEQKLLYVEQHKHYLDEIIDQISEFSKRVILADKNLEKVLSAYNEHRDK | |
| | SIEEQAENIIHLFTLTNLGAPAAFKYFGTTIDRKRYTSTKEVLDATLIHQSI | |
| | TGLYETRIDLSQLGGD | |
| CasEnd-55 | MDKKYSIGLDIGTNSVGWAVITDEYKVPSKKFKVLGNTDRHSIKKNLIGALL | 15 |
| | FDSGETAEATRLKRTARRRYTRRKNRIRYLQEIFAEEMAKVDDSFFHRLEES | |
| | FLVEEDKKHERHPIFGNIVDEVAYHEKYPTIYHLRKKLVDSDEKADLRLIYL | |
| | ALAHMIKFRGHFLIEGDLNSDNSDVQKLFIQLVQTYNQLFEENPINAEGVDA | |
| | KAILSARLSKSRRLENLIAQLPGEKKNGLFGNLIALSLGLTPNFKSNEDLSE | |
| | DAKLQLSKDTYDDDLENLLGQIGDQYADLFLAAKNLSDAILLSDILRVNTEI | |
| | TKAPLSASMIKRYDEHHQDLTLLKDLVRDQLPEKYKEIFFDQSKNGYAGYID | |
| | GGASQEEFYKYIKPILEKMDGTEELLEKLNREDLLRKQRTFDNGSIPHQIHL | |
| | GELHAILRRQEEYYPFLKENREKIEKILTFRIPYYVGPLARGNSRFAWMTRK | |
| | SDETITPWNFEEVVDKGASAQKFIERMTNFDKNLPNEKVLPKHSLLYEYFTV | |
| | YNELTKVKYVTEGMRKPEFLSGEQKKEIVDLLFKKNRKVTVKQLKEYYFKKF | |
| | ECFDSVEISGVEDRFNASLGTYHDLLKIIKDKDFLDNEENEKILEDIVLTLT | |
| | LFEDREMIKERLKKYANLFDKKVMKQLKRRRYTGWGRLSRKLINGIRDKQSG | |
| | KTILDFLKEDGFANRNFMQLIHDDSLTFKEEIEKAQVIGKGESLHEHIANLA | |
| | GSPAIKKGILQTVKVVDELVKVMGRHKPENIVIEMARENQTTQKGQKNSRER | |
| | MKRIEEGIKELGSQILKEHPVENTQLQNEKLYLYYLQNGRDMYVDQELDINR | |
| | LSDYDVDHIVPQSFLKDDSIDNKVLTRSDKARGKSDNVPSEEVVKKMKNYWR | |
| | QLLNAKLITQRKFDNLTKAERGGLSELDKAGFIKRQLVETRQITKHVAQILD | |
| | SRMNTKYDENDKLIRDVKVITLKSKLVSDFRKDFQFYKVREINNYHHAHDAY | |
| | LNAVVGTALIKKYPKLESEFVYGDYKVYDVRKMIAKSEQEIGKATAKYFFYS | |
| | NIMNFFKSEITLANGEIRKRPLIETNEETGEIVWDKEKDFATVRKVLSMPQV | |
| | NIVKKTEVQTGGFSKESILPKRNSDKLIARKKDWDPKKYGGFDSPTVAYSVL | |
| | VVAKVEKGKAKKLKTVKELLGITIMERSAFEKNPVAFLEAKGYQEVKKDLII | |
| | KLPKYSLFELENGRKRMLASAGELQKGNELALPSKYVNFLYLASHYEKLKGS | |
| | PEDNEQKQLFVEQHKHYLDEIIDQISEFSKRVILADANLEKVKSAYEKHRDK | |
| | SIEEQAENIIHLFTLTALGAPAAFKYFDTTIDRKRYTSTKEVLNATLIHQSI | |
| | TGLYETRIDLSQLGGD | |
| CasEnd-56 | MDKKYSIGLDIGTNSVGWAVITDEYKVPSKKFKVLGNTDRHSIKKNLIGALL | 16 |
| | FDSGETAEATRLKRTARRRYTRRKNRICYLQEIFSNEMAKVDDSFFHRLEES | |
| | FLVEEDKKHERHPIFGNIVDEVAYHEKYPTIYHLRKKLADSTEKADLRLIYL | |
| | ALAHIIKFRGHFLIEGDLNSENSDVQKLFIQLVQTYNQLFEENPINEEGVDA | |
| | KAILSAKLSKSRRLENLIAQFPGEKKNGLFGNLIALSLGLTPNFKSNEDLSE | |
| | DAKLQLSKDTYDEDLDNLLAQIGDQYADLFLAAKNLSDAILLSDILTVNDEI | |
| | TKAPLSASMIKRYDEHHQDLTLLKALVRQQLPEKYKEIFFDESKNGYAGYID | |
| | GGASQEEFYKFIKPILEKMDGTEELLAKINREDFLRKQRTFDNGSIPHQIHL | |
| | GELHAILRRQEEFYPFLKENREKIEKILTFRIPYYVGPLARGNSRFAWMTRK | |
| | SDETITPWNFEEVVDKGASAQAFIERMTNFDKNLPTEKVLPKHSLLYEYFTV | |
| | YNELTKVKYVTEGMGKPEFLSGEQKKEIVDLLFKKNRKVTVKQLKEDYFKKI | |
| | ECFDSVEISGVEDRFNASLGTYHDLLKIIKDKDFLDNEENEDILEDIVLTLT | |
| | LFEDREMIEERLKKYAHLFDKKVLKQLKRRRYTGWGRLSKKLINGIRDKQSG | |
| | KTILDFLKSDGFANRNFMQLIHDDSLTFKEAIKKAQVSGQGDSLHEHIANLA | |
| | GSPAIKKGILQTVKVVDELVKVMGRHKPENIVIEMARENQTTQKGQKNSRER | |
| | MKRIEEAIKELGSQILKEHPVENTQLQNDKLYLYYLQNGKDMYTGEELDIDR | |
| | LSDYDVDHIIPQSFIKDDSIDNKVLTSSKKARGKSDDVPSEEVVKKMKNYWR | |
| | QLLNAKLISQRKFDNLTKAERGGLSELDKAGFIKRQLVETRQITKHVAQILD | |
| | SRMNTKYDENDKLIREVKVITLKSKLVSDFRKDFQFYKVREINNYHHAHDAY | |
| | LNAVVGTALIKKYPKLESEFVYGDYKVYDVRKMIAKSEQEIGKATAKYFFYS | |
| | NIMNFFKTEITLANGEIRKRPLIETNGETGEIVWDKGRDFATVRKVLSMPQV | |
| | NIVKKTEVQTGGFSKESILPKRESDKLIARKKDWDTKKYGGFDSPTVAYSVL | |
| | VVAKVEKGKAKKLKTVKELVGITIMERSSFEKDPVAFLEDKGYKDIQKDLII | |
| | KLPKYSLFELENGRKRLLASAGELQKGNELALPQKYVTFLYHASHYEKLKGS | |
| | PEDNEKKLLYVEQHKNYFDEILDQISEFSKRYILADKNLEKIKSLYNENEDY | |
| | SIEELAESFINLFTLTALGAPAAFKFFDTTIDRKRYTSTKEILDATLIHQSI | |
| | TGLYETRIDLSQLGGD | |
| CasEnd-57 | MDKKYSIGLDIGTNSVGWAVITDEYKVPSKKFKVLGNTDRHSIKKNLIGALL | 17 |
| | FDSGETAEATRLKRTARRRYTRRKNRICYLQEIFSNEMAKVDDSFFHRLEES | |
| | FLVEEDKKHERHPIFGNIVDEVAYHEKYPTIYHLRKELADSTEKADLRLIYL | |
| | ALAHIIKFRGHFLIEGDLNSDNSDVQKLFIQLVQTYNQLFEENPLNESGVDA | |
| | KAILSAKLSKSRRLENLIAQFPGEKRNGLFGNLIALSLGLTPNFKSNEDLAE | |
| | DAKLQLSKDTYDEDLDNLLAQIGDQYADLFLAAKNLSDAILLSGILTVNDEI | |
| | TKAPLSASMIKRYDEHHQDLTLLKALVRQQLPEKYKEIFFDESKNGYAGYID | |
| | GGASQEEFYKYIKPILEKMDGTEELLAKLNREDFLRKQRTFDNGSIPHQIHL | |
| | GELHAILRRQEDYYPFLKENREKIEKILTFRIPYYVGPLARGNSRFAWMTRK | |
| | SDETITPWNFEEVVDKEASAQAFIERMTNFDKNLPTEKVLPKHSLLYEYFTV | |
| | YNELTKVKYVTEGMGKPEFLSGEQKQEIVDLLFKKNRKVTVKQLKEDLFKEI | |
| | ECFDSVEISGVEDRFNASLGTYHDLLKIIKDKDFLDNEENEDILEDIVLTLT | |
| | LFEDREMIEERLKKYADLFDDKVLKKLKRRRYTGWGRLSRKLINGIRDKQSG | |
| | KTILDFLKSDGFANRNFMQLIHDDSLTFKEEIQKAQVKGQGDSLHEHIANLA | |
| | GSPAIKKGILQTVKVVDELVKVMGRHKPENIVIEMARENQTTQKGQKNSRER | |
| | MKRIEEGIKELGSQILKEHPVENTQLQNDKLYLYYLQNGKDMYTGEELDIDR | |
| | LSDYDVDHIIPQSFIKDDSIDNKVLTSSKKARGKSDDVPSEEVVKKMKSYWR | |
| | QLLKAKLISQRKFDNLTKAERGGLSELDKAGFIKRQLVETRQITKHVAQILD | |
| | SRMNTKYDENDKLIREVKVITLKSKLVSDFRKDFQFYKVREINNYHHAHDAY | |
| | LNAVVGTALIKKYPKLESEFVYGDYKVYDVRKMIAKSEQEIGKATAKYFFYS | |
| | NIMNFFKTEITLANGEIRKRPLIETNGETGEIVWDKGRDFATVRKVLSMPQV | |
| | NIVKKTEVQTGGFSKESILPKRESDKLIARKKDWDTKKYGGFDSPTVAYSVL | |
| | VVAKVEKGKSKKLKTVKELVGITIMERSSFEKNPIDFLEAKGYKNVQKDLII | |
| | KLPKYSLFELENGRKRLLASAGELQKGNELALPSKYVTFLYLASHYEKLKGS | |
| | PEDNEQKQLFVEQHKHYFDEILDQISEFSERYILADKNLDKILSLYNENRDY | |
| | SIEEQAENFINLFTLTNLGAPAAFKFFGTTIDRKRYTSTKEILDATLIHQSI | |
| | TGLYETRIDLSQLGGD | |
| CasEnd-58 | MDKKYSIGLDIGTNSVGWAVITDEYKVPSKKFKVLGNTDRHSIKKNLIGALL | 18 |
| | FDSGETAEATRLKRTARRRYTRRKNRICYLQEIFSNEMAKVDDSFFHRLEES | |
| | FLVEEDKKHERHPIFGNIVDEVAYHEKYPTIYHLRKKLADSDEKADLRLIYL | |
| | ALAHMIKFRGHFLIEGDLNSDNSDVQKLFIQLVQTYNQLFEENPINEEGVDA | |
| | KAILSARLSKSRRLENLIAQFPGEKKNGLFGNLIALSLGLIPNFKSNEDLAE | |
| | DAKLQLSKDTYDDDLENLLGQIGDQYADLFLAAKNLSDAILLSDILTVNSEI | |
| | TKAPLSASMVKRYDEHHQDLTLLKALVRQQLPEKYKEIFFDQSKNGYAGYID | |
| | GGASQEEFYKYIKPILEKMDGTEEFLAKINREDFLRKQRTFDNGSIPHQIHL | |
| | GELHAILRRQEKYYPFLKENREKIEKILTFRIPYYVGPLARGNSRFAWMTRK | |
| | SDETITPWNFEEVVDKEASAQAFIERMTNFDKNLPNEKVLPKHSLLYEYFTV | |
| | YNELTKVKYVTEGMRKPEFLSGEQKQEIVDLLFKKNRKVTVKQLKEDYFKKI | |
| | ECFDSVEISGVEDRFNASLGTYHDLLKIIKDKDFLDNEENEDILEDIVLTLT | |
| | LFEDREMIEERLKKYANLFDDKVLKQLKRRRYTGWGRLSRKLINGIRDKQSG | |
| | KTILDFLKSDGFANRNFMQLIHDDSLTFKEEIEKAQVSGQGDSLHEHIANLA | |
| | GSPAIKKGILQTVKVVDELVKVMGRHKPENIVIEMARENQTTQKGQKNSRER | |
| | MKRIEEGIKELGSQILKEHPVENTQLQNEKLYLYYLQNGRDMYVDQELDINR | |
| | LSDYDVDHIVPQSFLKDDSIDNKVLTRSDKARGKSDNVPSEEVVKKMKNYWR | |
| | QLLNAKLITQRKFDNLTKAERGGLSELDKAGFIKRQLVETRQITKHVAQILD | |
| | SRMNTKYDENDKLIREVKVITLKSKLVSDFRKDFQFYKVREINNYHHAHDAY | |
| | LNAVVGTALIKKYPKLESEFVYGDYKVYDVRKMIAKSEQEIGKATAKYFFYS | |
| | NIMNFFKTEITLANGEIRKRPLIETNGETGEIVWDKGRDFATVRKVLSMPQV | |
| | NIVKKTEVQTGGFSKESILPKRNSDKLIARKKDWDTKKYGGFDSPTVAYSVL | |
| | VVAKVEKGKAKKLKTVKELVGITIMERSSFEKNPIAFLEAKGYKEVKKDLII | |
| | KLPKYSLFELENGRKRLLASAGELQKGNELALPSKYVTLLYLASHYEKLKGS | |
| | PEDNEQKQLFVEQHKHYFDEIIDQISEFSKRYILADANLEKIKSLYEKNRDK | |
| | SIEEQAENFIHLLTFTALGAPAAFKFFDTTIDRKRYTSTKEILNATLIHQSI | |
| | TGLYETRIDLSQLGGD | |
| CasEnd-59 | MKKKYSIGLDIGTNSVGWAVITDEYKVPSKKFKVLGNTDRQSIKKNLLGALL | 19 |
| | FDSGETAEATRLKRTARRRYTRRKNRIRYLQEIFAEEMAKVDDSFFHRLEES | |
| | FLVEEDKKHERHPIFGNIVDEVAYHEKYPTIYHLRKKLADSTEKADLRLIYL | |
| | ALAHMIKFRGHFLIEGDLNPDNSDVDKLFIQLVQTYNQLFEENPINEEGVDA | |
| | KAILSARLSKSRRLENLIAQLPGEKKNGLFGNLIALSLGLTPNFKSNEDLAE | |
| | DAKLQLSKDTYDDDLDNLLAQIGDQYADLFLAAKNLSDAILLSDILTVNSEI | |
| | TKAPLSASMIKRYDEHHQDLTLLKALVRQQLPEKYKEIFFDKSKNGYAGYID | |
| | GGASQEEFYKFIKPILEKMDGTEELLAKLNREDLLRKQRTFDNGSIPHQIHL | |
| | GELHAILRRQEDFYPFLKENREKIEKILTFRIPYYVGPLARGNSRFAWMTRK | |
| | SEETITPWNFEEVVDKGASAQSFIERMTNFDKNLPNEKVLPKHSLLYEYFTV | |
| | YNELTKVKYVTEGMRKPEFLSGEQKQAIVDLLFKKNRKVTVKQLKEDYFKKI | |
| | ECFDSVEISGVEDRFNASLGTYHDLLKIIKDKEFLDNEENEDILEDIILTLT | |
| | LFEDKEMIEERLKKYANLFDDKVLKQLKRRRYTGWGRLSRKLINGIRDKQSG | |
| | KTILDFLKSDGFANRNFMQLIHDDSLTFKEEIKKAQVSGQGDSLHEQIANLA | |
| | GSPAIKKGILQTVKIVDELVKVMGRHKPENIVIEMARENQTTQKGQKNSRER | |
| | MKRIEEGIKELGSQILKEHPVENTQLQNEKLYLYYLQNGKDMYTGQELDIDR | |
| | LSDYDVDHIIPQSFIKDDSIDNKVLTSSKKARGKSDNVPSEEVVKKMKNYWR | |
| | QLLNAKLISQRKFDNLTKAERGGLSELDKAGFIKRQLVETRQITKHVAQILD | |
| | SRMNTKRDENDKLIRDVKIITLKSKLVSDFRKDFQFYKVREINNYHHAHDAY | |
| | LNAVVGTALIKKYPKLESEFVYGDYKVYDVRKMIAKSEQEIGKATAKRFFYS | |
| | NIMNFFKTEITLANGEIRKRPLIETNEETGEIVWDKEKDFATVRKVLSMPQV | |
| | NIVKKTEVQTGGFSKESILPKRESDKLIARKKDWDPKKYGGFDSPTVAYSVL | |
| | VVAKVEKGKAKKLKSVKELVGITIMERSSFEKDPVAFLEAKGYKEIQKDLII | |
| | KLPKYSLFELENGRKRMLASAGELQKGNELALPSKYVTFLYLASHYEKLKGS | |
| | PEDNEQKQLFVEQHKHYLDEILDQISEFSERYILADKNLDKILSLYNKHRDK | |
| | SIEEQAENIINLFTLTNLGAPAAFKFFDTTIDRKRYTSTKEILNATLIHQSI | |
| | TGLYETRIDLSQLGGD | |
| CasEnd-60 | MDKKYSIGLDIGTNSVGWAVITDEYKVPSKKFKVLGNTDRQSIKKNLLGALL | 20 |
| | FDSGETAEATRLKRTARRRYTRRKNRIRYLQEIFANEMAKVDDSFFHRLEES | |
| | FLVEEDKRHERHPIFGNIVDEVAYHEKYPTIYHLRKELADSTEKADLRLIYL | |
| | ALAHMIKFRGHFLIEGDLNSDNSDVDKLFIQLVQTYNQLFEENPINESGVDA | |
| | KAILSAKLSKSRRLENLIAQLPGEKKNGLFGNLIALSLGLTPNFKSNEDLSE | |
| | DAKLQLSKDTYDDDLDNLLAQIGDQYADLFLAAKNLSDAILLSDILTVNSEI | |
| | TKAPLSASMIKRYDEHHQDLTLLKALVRQQLPEKYKEIFFDESKNGYAGYID | |
| | GGASQEEFYKFIKPILEKMDGTEELLAKLNREDFLRKQRTFDNGSIPHQIHL | |
| | GELHAILRRQEDFYPFLKENREKIEKILTFRIPYYVGPLARGNSRFAWMTRK | |
| | SDETITPWNFEEVVDKGASAQAFIERMTNFDKNLPNEKVLPKHSLLYEYFTV | |
| | YNELTKVKYVTEGMRKPEFLSGEQKKEIVDLLFKKNRKVTVKQLKEDYFKKI | |
| | ECFDSVEISGVEDRFNASLGTYHDLLKIIKDKDFLDNEENEDILEDIVLTLT | |
| | LFEDKEMIEERLKKYANLFDDKVLKQLKRRRYTGWGRLSKKLINGIRDKQSG | |
| | KTILDFLKSDGFANRNFMQLIHDDSLTFKEEIQKAQVSGQGDSLHEQIANLA | |
| | GSPAIKKGILQTVKIVDELVKVMGRHKPENIVIEMARENQTTQKGQKNSRER | |
| | MKRLEEGLKELGSQILKEHPVENTQLQNDKLYLYYLQNGKDMYTGQELDIDR | |
| | LSDYDVDHIIPQSFIKDDSIDNKVLTSSDKARGKSDNVPSEEVVKKMKSYWR | |
| | QLLNAKLISQRKFDNLTKAERGGLSELDKAGFIKRQLVETRQITKHVAQILD | |
| | SRFNTERDENDKLIREVKIITLKSKLVSDFRKDFQFYKVREINNYHHAHDAY | |
| | LNAVVGTALIKKYPKLESEFVYGDYKVYDVRKMIAKSEQEIGKATAKRFFYS | |
| | NIMNFFKTEIKLANGEIRKRPLIETNEETGEIVWDKEKDFATVRKVLSMPQV | |
| | NIVKKTEVQTGGFSKESILPKRNSDKLIARKKDWDTKKYGGFDSPTVAYSVL | |
| | VVAKVEKGKTKKLKTVKELVGITIMERSSFEKDPVAFLEKKGYKEIQKDLII | |
| | KLPKYSLFELENGRKRMLASAGELQKGNELALPSKYVTFLYLASHYEKLKGS | |
| | PEDNEQKQLFVEQHKDYFDEIIEQISEFSKRYILADKNLEKILSLYNKNSDK | |
| | PIEEQAESIINLFTLTNLGAPAAFKFFDTTIDRKRYTSTKEILDATLIHQSI | |
| | TGLYETRIDLSQLGGD | |
| CasEnd-61 | MDKKYSIGLDIGTNSVGWAVITDEYKVPSKKFKVLGNTDRHSIKKNLLGALL | 21 |
| | FDSGETAEATRLKRTARRRYTRRKNRIRYLQEIFSEEMAKVDDSFFHRLEES | |
| | FLVEEDKKHERHPIFGNIVDEVAYHEKYPTIYHLRKYLADSPEKADLRLIYL | |
| | ALAHIIKFRGHFLIEGDLNSDNSDVQKLFIQLVQTYNQLFEESPLNAEGVDA | |
| | KAILSARLSKSRRLENLIAQIPGEKKNGLFGNLIALSLGLTPNFKSNEDLAE | |
| | DAKLQLSKDTYDDDLENLLAQIGDQYADLFLAAKNLSDAILLSGILTVNDEI | |
| | TKAPLSASMIKRYDEHHQDLTLLKALIRQQLPEKYKEIFFDQSKNGYAGYID | |
| | GGASQEEFYKYLKPILEKLDGSEEFLAKIEREDFLRKQRTFDNGSIPHQIHL | |
| | GELHAILRRQEKYYPFLKDNREKIEKILTFRIPYYVGPLARGNSRFAWMTRK | |
| | SDETITPWNFEEVVDKEASAQAFIERMTNFDKNLPNEKVLPKHSLLYEKFTV | |
| | YNELTKVKYVTEGMRKPEFLSAEQKQEIVDLLFKKNRKVTVKQLKEFYFKEI | |
| | ECFDIVEISGVEDRFNASLGTYHDLLKIIKDKDFLDNEENEDILEDIVLTLT | |
| | LFEDREMIEERLKKYANLFDKKVLKKLKRRRYTGWGRLSAKLINGIRDKQSG | |
| | KTILDFLKADGFANRNFMQLIHDDSLTFKEEIKKAQVIGQGESLHELIANLA | |
| | GSPAIKKGILQTIKIVDELVKVMGRHKPENIVIEMARENQTTQKGQKNSRER | |
| | MKRIEEAIKELGSQILKEHPVENTQLQNEKLYLYYLQNGKDMYTGEELDIDR | |
| | LSDYDVDHIVPQSFLKDDSIDNKVLVSSEKARGKSDNVPSEEVVKKMKSYWS | |
| | KLLDAKLITQRKFDNLTKAERGGLTELDKAGFIKRQLVETRQITKHVAQILD | |
| | SRFNTKYDENDKLIRDVKIITLKSKLVSDFRKDFQLYKVREINNYHHAHDAY | |
| | LNAVVGTALIKKYPKLESEFVYGDYKVYDVRKMIAKSEQEIGKATAKMFFYS | |
| | NIMNFFKSEISLANGEIRKRPLIETNEETGEIVWDKGKDFATVRKVLSMPQV | |
| | NIVKKTEVQTGGFSKESILPKRNSDKLIARKKDWDTKKYGGFDSPTVAYSVL | |
| | VIAKVEKGKAKKLKTVKELVGITIMERSSFEKNPIAFLEDKGYKEIKKDLII | |
| | KLPKYSLFELENGRKRLLASAGELQKGNELALPNKYVTFLYLASHYEKLKGS | |
| | EEDNEQKQNFVEQHKHYFDEIIEQISEFSKRYILADANLEKILSLYEKNRDL | |
| | SIEEQAESFINLFTFTALGAPAAFKFFDTTIDRKRYTSTKEVLNATLIHQSI | |
| | TGLYETRIDLSQLGGD | |
| CasEnd-62 | MKKKYSIGLDIGTNSVGWAVITDDYKVPSKKFKVLGNTDRQSIKKNLIGALL | 22 |
| | FDSGETAEATRLKRTARRRYTRRKNRIRYLQEIFAEEMAKVDDSFFQRLEES | |
| | FLVEEDKKHERHPIFGNIVDEVAYHEKYPTIYHLRKKLVDSTEKADLRLIYL | |
| | ALAHMIKFRGHFLIEGDLNSENSDVQKLFIQLVQTYNQLFEENPINESGVDA | |
| | KAILSARLSKSRRLENLIAQIPGEKKNGLFGNLIALSLGLTPNFKSNFDLAE | |
| | DAKLQLSKDTYDDDLDNLLAQIGDQYADLFLAAKNLSDAILLSDILRVNTEI | |
| | TKAPLSASMIKRYDEHHQDLTLLKALVRQQLPEKYKEIFFDKSKNGYAGYID | |
| | GGASQEEFYKFIKPILEKMDGTEELLAKLNREDLLRKQRTFDNGSIPHQIHL | |
| | GELHAILRRQEEFYPFLKENREKIEKILTFRIPYYVGPLARGNSRFAWMTRK | |
| | SDETITPWNFEEVVDKGASAQSFIERMTNFDENLPNEKVLPKHSLLYEYFTV | |
| | YNELTKVKYVTEGMGKPEFLSGEQKKEIVDLLFKKNRKVTVKQLKEDYFKKI | |
| | ECFDSVEISGVEDRFNASLGTYHDLLKIIKDKDFLDNEENEDILEDIVLTLT | |
| | LFEDREMIEERLKKYANLFDDKVMKQLKRRRYTGWGRLSRKLINGIRDKQSG | |
| | KTILDFLKSDGFANRNFMQLIHDDSLTFKEEIKKAQVKGQGDSLHEQIANLA | |
| | GSPAIKKGILQTVKVVDELVKVMGRHKPENIVIEMARENQTTQKGQKNSRER | |
| | MKRIEEGIKELGSQILKEHPVENAQLQNDKLYLYYLQNGRDMYTGEELDINR | |
| | LSQYDVDHIVPQSFLKDDSIDNKVLTRSEKARGKSDNVPSEEVVKKMKSYWR | |
| | QLLNAKLITQRKFDNLTKAERGGLSELDKAGFIKRQLVETRQITKHVAQILD | |
| | SRMNTKRDENDKLIRDVKVITLKSKLVSDFRKDFQFYKVREINNYHHAHDAY | |
| | LNAVVGTALIKKYPKLESEFVYGDYKKYDVRKMIAKSEQEIGKATAKYFFYS | |
| | NIMNFFKSEIKLANGEIRKRPLIETNEETGEIVWDKERDFATVRKVLSMPQV | |
| | NIVKKTEVQTGGFSKESILPKRESDKLIARKKGWDPKKYGGFDSPTVAYSVL | |
| | VVAKVEKGKSKKLKTVKELLGITIMERSSFEKDPVDFLEAKGYKEVKKDLII | |
| | KLPKYSLFELENGRKRMLASAGELQKGNELALPSKYVNFLYLASHYEKLKGK | |
| | PEDNEQKQLYVEQHKHYLDEIIDQISEFSKRVILADKNLEKVLSAYNNHRDK | |
| | SIREQAENIIHLFTLTNLGAPAAFKYFDTTIDRKRYTSTKEVLDATLIHQSI | |
| | TGLYETRIDLSQLGGD | |
| CasEnd-63 | MDKKYSIGLDIGTNSVGWAVITDEYKVPSKKFKVLGNTDRHSIKKNLIGALL | 23 |
| | FDSGETAEATRLKRTARRRYTRRKNRICYLQEIFSNEMAKVDDSFFHRLEES | |
| | FLVEEDKKHERHPIFGNIVDEVAYHEKYPTIYHLRKKLADSTEKADLRLIYL | |
| | ALAHIIKFRGHFLIEGDLNSDNSDVDKLFIQLVQTYNQLFEENPINESGVDA | |
| | KAILSAKLSKSRRLENLIAQFPGEKRNGLFGNLIALSLGLTPNFKSNFDLAE | |
| | DAKLQLSKDTYDEDLENLLAQIGDQYADLFLAAKNLSDAILLSDILTVNSEI | |
| | TKAPLSASMIKRYDEHHQDLTLLKALVRQQLPEKYKEIFFDKSKNGYAGYID | |
| | GGASQEEFYKYIKPILEKMDGTEEFLAKINREDFLRKQRTFDNGSIPHQIHL | |
| | GELHAILRRQEEYYPFLKENREKIEKILTFRIPYYVGPLARGNSRFAWMTRK | |
| | SDETITPWNFEEVVDKGASAEAFIERMTNFDKNLPSEKVLPKHSLLYEYFTV | |
| | YNELTKVKYVTEGMGKPHFFDGNVKQEIVDLLFKKDRKVTKKKLLDFLFKEI | |
| | DEFRIVDISGVEDAFNASLGTYHDLLKIIKDKDFLDNEENEDILEDIVLTLT | |
| | LFEDKEMIEERLKKYANLFDKKVLKQLKRRRYTGWGRLSRKLINGIRDKQSG | |
| | KTILDFLKSDGFANRNFMQLIHDDSLTFKEAIKKAQVSGQGDSLHEHIANLA | |
| | GSPAIKKGILQTVKVVDELVKVMGRHKPENIVIEMARENQTTQKGQKNSRER | |
| | MKRIEEGIKELGSQILKEHPVENTQLQNEKLYLYYLQNGRDMYVDQELDINR | |
| | LSDYDVDHIVPQSFLKDDSIDNKVLTRSDKARGKSDNVPSEEVVKKMKNYWR | |
| | QLLNAKLITQRKFDNLTKAERGGLSELDKAGFIKRQLVETRQITKHVAQILD | |
| | SRMNTKYDENDKLIREVKVITLKSKLVSDFRKDFQFYKVREINNYHHAHDAY | |
| | LNAVVGTALIKKYPKLESEFVYGDYKVYDVRKMIAKSEQEIGKATAKYFFYS | |
| | NIMNFFKTEITLANGEIRKRPLIETNGETGEIVWDKGRDFATVRKVLSMPQV | |
| | NIVKKTEVQTGGFSKESILPKRNSDKLIARKKDWDPKKYGGFDSPTVAYSVL | |
| | VVAKVEKGKSKKLKSVKELLGITIMERSSFEKNPIDFLEAKGYKEVKKDLII | |
| | KLPKYSLFELENGRKRMLASAGELQKGNELALPSKYVNFLYLASHYEKLKGS | |
| | PEDNEQKQLFVEQHKHYLDEIIEQISEFSKRVILADANLDKVLSAYNKHRDK | |
| | PIREQAENIIHLFTLTNLGAPAAFKYFDTTIDRKRYTSTKEVLDATLIHQSI | |
| | TGLYETRIDLSQLGGD | |
| CasEnd-64 | MDKKYSIGLDIGTNSVGWAVITDEYKVPSKKFKVLGNTDRHSIKKNLIGALL | 24 |
| | FDSGETAEATRLKRTARRRYTRRKNRICYLQEIFSNEMAKVDDSFFHRLEES | |
| | FLVEEDKRNERHPIFGNIVEEVAYHEKYPTIYHLRKHLADSDEKADLRLVYL | |
| | ALAHIIKFRGHFLIEGDLNAENSDVQKLFKELLEAYNQTFEESPLEEITVDA | |
| | EAILTEKLSKSRRLENLIAEFPGEKKNGLFGNLVALSLGLTPNFKSNEDLSE | |
| | DAKLQFSKDTYDEDLEELLGQIGDEYADLFVAAKNLYDAILLSGILTVKDSS | |
| | TKAPLSASMVKRYDEHHQDLTLLKNFVRKQLPEKYKEIFFDQSKNGYAGYID | |
| | GGASQEEFYKYLKKLLEKIDGSEYFLDKIEREDFLRKQRTFDNGSIPHQIHL | |
| | QELKAIIRRQEKYYPFLKENQEKIEKILTFRIPYYVGPLARGNSRFAWASRK | |
| | SDETITPWNFDEVVDKEKSAEKFIERMTNFDKNLPEEKVLPKHSLLYEKFTV | |
| | YNELTKVKYVTEGGKKPEFFDANMKQEIFDNVFKKYRKVTKKQLLDYLAKEF | |
| | DEFRIVDISGVEDRFNASLGTYHDLKKILGDKDFLDNDDNEKILEDIIKTLT | |
| | LFEDREMIKKRLEKYSDLFDKKQLKKLERRRYTGWGRLSAKLINGIRDKESG | |
| | KTILDYLIDDGFTNRNFMQLIHDDNLTFKEEIAKAQVIGKGDSLHEHIANLA | |
| | GSPAIKKGILQTVKVVDELVKVMGRHKPENIVIEMARENQTTQKGQKNSRER | |
| | MKRIEEGIKELGSQILKEHPVENTQLQNEKLYLYYLQNGRDMYVDQELDINR | |
| | LSDYDVDHIVPQSFLKDDSIDNKVLTRSDKARGKSDNVPSEEVVKKMKNYWR | |
| | QLLNAKLITQRKFDNLTKAERGGLSELDKAGFIKRQLVETRQITKHVAQILD | |
| | SRMNTKYDENDKLIREVKVITLKSKLVSDFRKDFQFYKVREINNYHHAHDAY | |
| | LNAVVGTALIKKYPKLESEFVYGDYKVYDVRKMIAKSEQEIGKATAKYFFYS | |
| | NIMNFFKTEITLANGEIRKRPLIETNGETGEIVWDKGRDFATVRKVLSMPQV | |
| | NIVKKTEVQTGGFSKESILPKRNSDKLIARKKDWDPKKYGGFDSPTVAYSVL | |
| | VVAKVEKGKSKKLKSVKELLGITIMERSSFEKNPIDFLEAKGYKEVKKDLII | |
| | KLPKYSLFELENGRKRMLASAGELQKGNELALPSKYVNFLYLASHYEKLKGS | |
| | PEDNEQKQLFVEQHKHYLDEIIEQISEFSKRVILADANLDKVLSAYNKHRDK | |
| | PIREQAENIIHLFTLTNLGAPAAFKYFDTTIDRKRYTSTKEVLDATLIHQSI | |
| | TGLYETRIDLSQLGGD | |
| CasEnd-65 | MDKKYSIGLDIGTNSVGWAVITDEYKVPSKKFKVLGNTDRHSIKKNLIGALL | 25 |
| | FDSGETAEATRLKRTARRRYTRRKNRIRYLQEIFAEEMAKVDDSFFHRLEES | |
| | FLVEEDKKNERHPIFGNIVDEVAYHEKYPTIYHLRKKLADSDEKADLRLIYL | |
| | ALAHIIKFRGHFLIEGDLNSDNSDVQKLFIQLVQTYNQLFEESPINEEGVDA | |
| | KAILTAKLSKSRRLENLIAQFPGEKKNGLFGNLIALSLGLTPNFKSNFDLAE | |
| | DAKLQFSKDTYDDDLENLLGQIGDQYADLFLAAKNLSDAILLSDILTVNSEI | |
| | TKAPLSASMVKRYDEHHQDLTLLKKLVRQQLPEKYKEIFFDQSKNGYAGYID | |
| | GGASQEEFYKYIKPILEKVDGSEELLAKIEREDFLRKQRTFDNGSIPHQIHL | |
| | GELHAILRRQEKYYPFLKENREKIEKILTFRIPYYVGPLARGNSRFAWMSRK | |
| | SEETITPWNFEEVVDKEASAQSFIERMTNFDKNLPNEKVLPKHSLLYEKFTV | |
| | YNELTKVKYVTEGMRKPEFLSAEQKQEIVDLLFKKNRKVTVKQLKEDYFKKI | |
| | ECFDSVEISGVEDRFNASLGTYHDLLKIIKDKDFLDNEENEDILEDIVLTLT | |
| | LFEDREMIEERLKKYAHLFDKKVLKQLKRRRYTGWGRLSRKLINGIRDKQSG | |
| | KTILDFLIDDGFANRNFMQLIHDDSLTFKEEIEKAQVIGQGESLHELIANLA | |
| | GSPAIKKGILQTVKIVDELVKVMGRHKPENIVIEMARENQTTQKGQKNSRER | |
| | MKRIEEGIKELGSQILKEHPVENTQLQNEKLYLYYLQNGRDMYVDQELDINR | |
| | LSDYDVDHIVPQSFLKDDSIDNKVLTRSDKARGKSDNVPSEEVVKKMKNYWR | |
| | QLLNAKLITQRKFDNLTKAERGGLSELDKAGFIKRQLVETRQITKHVAQILD | |
| | SRFNTKYDENDKLIRDVKIITLKSKLVSDFRKDFQLYKVREINNYHHAHDAY | |
| | LNAVVGTALIKKYPKLESEFVYGDYKVYDVRKMIAKSEQEIGKATAKYFFYS | |
| | NIMNFFKTEITLANGEIRKRPLIETNEETGEIVWDKGKDFATVRKVLSMPQV | |
| | NIVKKTEVQTGGFSKESILPKRNSDKLIARKKDWDPKKYGGFDSPTVAYSVL | |
| | VVAKVEKGKAKKLKTVKELVGITIMERSSFEKNPIAFLEAKGYKEVKKDLII | |
| | KLPKYSLFELENGRKRLLASAGELQKGNELALPNKYVTLLYLASHYEKLKGS | |
| | PEDNEEKQLFVEQHKHYFDEIIEQISEFSKRYILADANLEKILSLYEKNRDK | |
| | SIEEQAENFIHLFTFTALGAPAAFKFFDTTIDRKRYTSTKEILNATLIHQSI | |
| | TGLYETRIDLSQLGGD | |
| CasEnd-66 | MDKKYSIGLDIGTNSVGWAVITDEYKVPSKKFKVLGNTDRHSIKKNLIGALL | 26 |
| | FDSGETAEATRLKRTARRRYTRRKNRICYLQEIFSNEMAKVDDSFFHRLEES | |
| | FLVEEDKKHERHPIFGNIVDEVAYHEKYPTIYHLRKKLADSTEKADLRLIYL | |
| | ALAHMIKFRGHFLIEGDLNSDNSDVDKLFIQLVQTYNQLFEEDPINESGVDA | |
| | KAILSAKLSKSRRLENLIAQFPGEKKNGLFGNLIALSLGLTPNFKSNEDLAE | |
| | DAKLQLSKDTYDEDLENLLAQIGDQYADLFLAAKNLSDAILLSDILTVNSEI | |
| | TKAPLSASMIKRYDEHHQDLTLLKALVRQQLPEKYKEIFFDESKNGYAGYID | |
| | GGASQEEFYKYIKPILEKMDGTEELLAKLNREDFLRKQRTFDNGSIPHQIHL | |
| | GELHAILRRQEDFYPFLKENREKIEKILTFRIPYYVGPLARGNSRFAWMTRK | |
| | SEETITPWNFEEVVDKGASAQAFIERMTNFDKNLPNEKVLPKHSLLYEYFTV | |
| | YNELTKVKYVTEGMRKPEFLSGEQKKEIVDLLFKKNRKVTVKQLKEDYFKKI | |
| | ECFDSVEISGVEDRFNASLGTYHDLLKIIKDKDFLDNEENEDILEDIVLTLT | |
| | LFEDREMIEERLKKYANLFDDKVLKQLKRRRYTGWGRLSKKLINGIRDKQSG | |
| | KTILDFLKSDGFANRNFMQLIHDDSLTFKEEIKKAQVKGQGDSLHEHIANLA | |
| | GSPAIKKGILQTVKVVDELVKVMGRHKPENIVIEMARENQTTQKGQKNSRER | |
| | MKRLEEGIKELGSQILKEHPVENTQLQNDKLYLYYLQNGKDMYTGDELDIDR | |
| | LSDYDVDHIIPQSFIKDDSIDNKVLTSSDKARGKSDNVPSEEVVKKMKSYWR | |
| | QLLNAKLISQRKFDNLTKAERGGLSELDKAGFIKRQLVETRQITKHVAQILD | |
| | SRMNTKYDENDKLIREVKVITLKSKLVSDFRKDFQFYKVREINNYHHAHDAY | |
| | LNAVVGTALIKKYPKLESEFVYGDYKVYDVRKMIAKSEQEIGKATAKYFFYS | |
| | NIMNFFKTEITLANGEIRKRPLIETNGETGEIVWDKGRDFATVRKVLSMPQV | |
| | NIVKKTEVQTGGFSKESILPKRNSDKLIARKKDWDTKKYGGFDSPTVAYSVL | |
| | VVAKVEKGKSKKLKTVKELVGITIMERSSFEKDPVAFLEAKGYKNIQKDLII | |
| | KLPKYSLFELENGRKRLLASAGELQKGNELALPSKYVTFLYLASHYEKLKGS | |
| | PEDNEKKRLYVEQHKHYFDEIVDQISEFSKRYILADKNLEKILSLYNNNRDK | |
| | SINEQAENFINLFTLTALGAPAAFKFFDTTIDRKRYTSTKEILNSTLIHQSI | |
| | TGLYETRIDLSQLGGD | |
| CasEnd-67 | MDKKYSIGLDIGTNSVGWAVITDEYKVPSKKFKVLGNTDRHSIKKNLIGALL | 27 |
| | FDSGETAEATRLKRTARRRYTRRKNRICYLQEIFSNEMAKVDDSFFHRLEES | |
| | FLVEEDKKNERHPIFGNIVDEVAYHKKYPTIYHLRKKLADSDEKADLRLIYL | |
| | ALAHMIKFRGHFLIEGDLNSDNSDVQKLFIQLVQTYNQLFEENPINEEGVDA | |
| | KAILSERLSKSRRLENLIAQFPGEKKNGLFGNLIALSLGLTPNFKSNFDLAE | |
| | DAKLQLSKDTYDEDLENLLGQIGDQYADLFLAAKNLSDAILLSDILTVNDEI | |
| | TKAPLSASMVKRYDEHHKDLKLLKELVRQQLPEKYKEIFSDKSKNGYAGYID | |
| | GKTSQEEFYKYIKPILEKVDGSEEFLDKINREDFLRKQRTFDNGSIPHQIHL | |
| | GELHAILRRQEKYYPFLKENREKIEKILTFRIPYYVGPLARGNSRFAWMTRK | |
| | SDEKITPWNFDEVVDKEASAQKFIERMTNNDLYLPDEKVLPKHSLLYEYFTV | |
| | YNELTKVKYVTEGMRKPEFLSGEQKQEIVDLLFKKNRKVTVKKLKEYYFKKI | |
| | ECFDSVEISGVDDRFNASLGTYHDLLKIIKDKDFLDNEENEDILEDIVLTLT | |
| | LFEDREMIKKRLEKYADLFDKKQLKQLKRRHYTGWGRLSRKLINGIRDKQSG | |
| | KTILDFLISDGFANRNFMQLIHDDSLTFKEEIQKAQVIGDGDSLHEHIANLA | |
| | GSPAIKKGILQTVKVVDELVKVMGRHKPENIVIEMARENQTTQKGQRNSRQR | |
| | LKRLEEGIKELGSNILKENPVENTQLQNDRLYLYYLQNGKDMYTGEELDIDR | |
| | LSQYDIDHIIPQSFIKDDSIDNKVLVSSAEARGKSDNVPSEEVVKKMKGYWR | |
| | KLLEAGLISQRKFDNLTKAERGGLSELDKAGFIKRQLVETRQITKHVAQILD | |
| | SRMNTKYDENDKLIREVKVITLKSKLVSDFRKDFQFYKVREINNYHHAHDAY | |
| | LNAVVGTALIKKYPKLESEFVYGDYKVYDVRKMIAKSEQEIGKATAKYFFYS | |
| | NIMNFFKTEITLANGEIRKRPLIETNGETGEIVWDKGRDFATVRKVLSMPQV | |
| | NIVKKTEVQTGGFSKESILPKRNSDKLIARKKDWDPKKYGGFDSPTVAYSVL | |
| | VVAKVEKGKSKKLKSVKELLGITIMERSSFEKNPIDFLEAKGYKEVKKDLII | |
| | KLPKYSLFELENGRKRMLASAGELQKGNELALPSKYVNFLYLASHYEKLKGS | |
| | PEDNEQKQLFVEQHKHYLDEIIEQISEFSKRVILADANLDKVLSAYNKHRDK | |
| | PIREQAENIIHLFTLTNLGAPAAFKYFDTTIDRKRYTSTKEVLDATLIHQSI | |
| | TGLYETRIDLSQLGGD | |
| CasEnd-68 | MDKKYSIGLDIGTNSVGWAVITDEYKVPSKKFKVLGNTDRHSIKKNLIGALL | 28 |
| | FDSGETAEATRLKRTARRRYTRRKNRICYLQEIFSNEMAKVDDSFFHRLEES | |
| | FLVEEDKKHERHPIFGNIVDEVAYHEKYPTIYHLRKKLADSTEKADLRLIYL | |
| | ALAHMIKFRGHFLIEGDLNSDNSDVQKLFIQLVQTYNQLFEENPINEEGVDA | |
| | KAILSAKLSKSRRLENLIAQLPGEKRNGLFGNLIALSLGLTPNFKSNFDLAE | |
| | DAKLQLSKDTYDEDLENLLGQIGDQYADLFLAAKNLSDAILLSDILTVNSEI | |
| | TKAPLSASMIKRYDEHHQDLTLLKALVREQLPEKYKEIFFDETKNGYAGYID | |
| | GGASQEEFYKYIKPILEKMDGTEEFLAKINREDFLRKQRTFDNGSIPHQIHL | |
| | GELHAILRRQEEFYPFLKENREKIEKILTFRIPYYVGPLARGNSRFAWMTRK | |
| | SEETITPWNFEEVVDKGASAQAFIERMTNFDKNLPNEKVLPKHSLLYEYFTV | |
| | YNELTKVKYVTEGMGKPEFFSGEQKQEIVDLLFKKNRKVTVKQLKEDYFKKI | |
| | ECFDSVEISGVEDRFNASLGTYHDLLKIIKDKDELDNEENEDILEDIVLTLT | |
| | LFEDREMIEERLKKYADLFDDKVLKQLKRRRYTGWGRLSKKLINGIRDKQSG | |
| | KTILDFLKSDGFANRNFMQLIHDDSLTFKEEIQKAQVSGQGDSLHEHIANLA | |
| | GSPAIKKGILQTVKVVDELVKVMGRHKPENIVIEMARENQTTQKGQKNSRER | |
| | MKRIEEGIKELGSQILKEHPVENTQLQNEKLYLYYLQNGKDMYTGQELDIDR | |
| | LSDYDVDHIIPQSFIKDDSIDNKVLTSSEKARGKSDDVPSEEVVKKMKSYWR | |
| | QLLNAKLISQRKFDNLTKAERGGLSELDKAGFIKRQLVETRQITKHVAQILD | |
| | SRMNTKYDENDKLIREVKVITLKSKLVSDFRKDFQFYKVREINNYHHAHDAY | |
| | LNAVVGTALIKKYPKLESEFVYGDYKVYDVRKMIAKSEQEIGKATAKYFFYS | |
| | NIMNFFKTEITLANGEIRKRPLIETNGETGEIVWDKGRDFATVRKVLSMPQV | |
| | NIVKKTEVQTGGFSKESILPKRESDKLIARKKDWDTKKYGGFDSPTVAYSVL | |
| | VVAKVEKGKKKKLKTVKELVGITIMERSSFEKDPIAFLEAKGYKEVQEDLII | |
| | KLPKYSLFELENGRKRLLASAGELQKGNELALPNKYVTFLYLASHYEKLKGS | |
| | PEDEEQHQLYVEQHKHYFDEIFDQISEFSERYILADKNLDKIKSLYNKNRDK | |
| | SISEQAESFINLFTLTALGAPAAFKFFGTTIDRKRYTSTKEILNATLIHQSI | |
| | TGLYETRIDLSQLGGD | |
| CasEnd-69 | MKKKYSIGLDIGTNSVGWAVITDEYKVPSKKFKVLGNTDRQSIKKNLLGALL | 29 |
| | FDSGETAEATRLKRTARRRYTRRKNRIRYLQEIFANEMAKVDDSFFHRLEES | |
| | FLVEEDKKHERHPIFGNIVDEVAYHEKYPTIYHLRKKLADSTEKADLRLIYL | |
| | ALAHMIKFRGHFLIEGDLNPDNSDVDKLFIQLVQTYNQLFEENPINESGVDA | |
| | KAILSARLSKSRRLENLIAQLPGEKKNGLFGNLIALSLGLTPNFKSNFDLAE | |
| | DAKLQLSKDTYDEDLDNLLAQIGDQYADLFLAAKNLSDAILLSDILTVNSEI | |
| | TKAPLSASMIKRYDEHHQDLTLLKALVRQQLPEKYKEIFFDQSKNGYAGYID | |
| | GGASQEEFYKYIKPILEKMDGTEELLAKINREDFLRKQRTFDNGSIPHQIHL | |
| | GELHAILRRQEDFYPFLKENREKIEKILTFRIPYYVGPLARGNSRFAWMTRK | |
| | SDETITPWNFEEVVDKGASAQAFIERMTNFDKNLPNEKVLPKHSLLYEYFTV | |
| | YNELTKVKYVTEGMRKPEFLSGEQKQEIVDLLFKKNRKVTVKQLKEDYFKKI | |
| | ECFDSVEISGVEDRFNASLGTYHDLLKIIKDKDFLDNEENEDILEDIVLTLT | |
| | LFEDKEMIEERLKKYAHLFDDKVLKQLKRRRYTGWGRLSRKLINGIRDKQSG | |
| | KTILDFLKSDGFANRNFMQLIHDDSLTFKEDIQKAQVSGQGDSLHEQIANLA | |
| | GSPAIKKGILQTVKIVDELVKVMGRHKPENIVIEMARENQTTQKGQKNSRER | |
| | MKRLEEGIKELGSQILKEHPVENTQLQNEKLYLYYLQNGKDMYTGEELDIDR | |
| | LSDYDVDHIIPQSFIKDDSIDNKVLTSSKKARGKSDNVPSEEVVKKMKSYWR | |
| | QLLNAKLISQRKFDNLTKAERGGLSELDKAGFIKRQLVETRQITKHVAQILD | |
| | SRFNTEYDENDKLIREVKIITLKSKLVSDFRKDFQFYKVREINNYHHAHDAY | |
| | LNAVVGTALIKKYPKLESEFVYGDYKVYDVRKMIAKSEQEIGKATAKRFFYS | |
| | NIMNFFKTEITLANGEIRKRPLIETNEETGEIVWDKEKDFATVRKVLSMPQV | |
| | NIVKKTEVQTGGFSKESILPKRNSDKLIARKKDWDTKKYGGFDSPTVAYSVL | |
| | VVAKVEKGKTKKLKTVKELVGITIMERSSFEKDPVDFLEAKGYKEIQKDLII | |
| | KLPKYSLFELENGRKRMLASAGELQKGNELALPSKYVTFLYLASHYEKLKGS | |
| | PEDNEQKQLYVEQHKHYFDEIVDQISEFSKRYILADANLDKILSLYNKNRDK | |
| | SIREQAENIINLETLTALGAPAAFKFFDTTIDRKRYTSTKEILDATLIHQSI | |
| | TGLYETRIDLSQLGGD | |
| CasEnd-70 | MKKKYSIGLDIGTNSVGWAVITDDYKVPSKKFKVLGNTDRQSIKKNLIGALL | 30 |
| | FDSGETAEATRLKRTARRRYTRRKNRIRYLQEIFAEEMAKVDDSFFHRLEES | |
| | FLVEEDKKHERHPIFGNIVDEVAYHEKYPTIYHLRKKLVDSTEKADLRLIYL | |
| | ALAHMIKFRGHFLIEGDLNPENSDVDKLFIQLVQTYNQLFEENPINESGVDA | |
| | KAILSAKLSKSRRLENLIAQLPGEKKNGLFGNLIALSLGLTPNFKSNFDLAE | |
| | DAKLQLSKDTYDDDLENLLAQIGDQYADLFLAAKNLSDAILLSDILRVNTEI | |
| | TKAPLSASMIKRYDEHHQDLTLLKALVRQQLPEKYKEIFFDPSKNGYAGYID | |
| | GGASQEEFYKFIKPILEKMDGTEELLAKLNREDLLRKQRTFDNGSIPHQIHL | |
| | GELHAILRRQEEFYPFLKENREKIEKILTFRIPYYVGPLARGNSRFAWMTRK | |
| | SEETITPWNFEEVVDKGASAQSFIERMTNEDENLPNEKVLPKHSLLYEYFTV | |
| | YNELTKVKYVTEGMGKPEFLSGEQKKEIVDLLFKKNRKVTVKQLKEDYFKEI | |
| | ECFDSVEISGVEDRFNASLGTYHDLLKIIKDKDFLDNEENEDILEDIVLTLT | |
| | LFEDREMIEERLKKYANLFDKKVMKQLKRRRYTGWGRLSRKLINGIRDKQSG | |
| | KTILDFLKSDGFANRNFMQLIHDDSLTFKEAIKKAQVSGQGDSLHEQIANLA | |
| | GSPAIKKGILQTVKVVDELVKVMGRHKPENIVIEMARENQTTQKGQKNSRER | |
| | MKRIEEGIKELGSQILKEHPVENTQLQNEKLYLYYLQNGRDMYTGEELDINR | |
| | LSDYDVDHIVPQSFLKDDSIDNKVLTRSDKARGKSDNVPSEEVVKKMKNYWR | |
| | QLLKAGLITQRKFDNLTKAERGGLSELDKAGFIKRQLVETRQITKHVAQILD | |
| | SRMNTKRDENDKLIRDVKVITLKSKLVSDFRKDFQFYKVREINNYHHAHDAY | |
| | LNAVVGTALIKKYPKLESEFVYGDYKKYDVRKMIAKSEQEIGKATAKYFFYS | |
| | NIMNFFKTEITLANGEIRKRPLIETNEETGEIVWDKERDFATVRKVLSMPQV | |
| | NIVKKTEVQTGGFSKESILPKRESDKLIARKKGWDPKKYGGFDSPTVAYSVL | |
| | VVAKVEKGKTKKLKTVKELLGITIMERSSFEKDPIAFLEAKGYKDVKKDLII | |
| | KLPKYSLFELENGRKRMLASAGELQKGNELALPSKYVNFLYLASHIEKLKGS | |
| | PEDEEKKQLYVEQHKHYLDEIIEQISEFSERVILADKNLDKVLSAYNNNRDK | |
| | SIEEQAENIIHLFTLTNLGAPAAFKYFGTTIDRKRYTSTKEVLDATLIHQSI | |
| | TGLYETRIDLSQLGGD | |
| CasEnd-71 | MDKKYSIGLDIGTNSVGWAVITDEYKVPSKKFKVLGNTDRHSIKKNLIGALL | 31 |
| | FDSGETAEATRLKRTARRRYTRRKNRIRYLQEIFAEEMAKVDDSFFHRLEES | |
| | FLVEEDKKNERHPIFGNIVDEVAYHEKYPTIYHLRKKLVDSDEKADLRLIYL | |
| | ALAHMIKFRGHFLIEGDLNSDNSDVQKLFIQLVETYNQLFEESPIEAEGVDA | |
| | KAILSEKLSKSRRLENLIAQLPGEKKNGLFGNLIALSLGLTPNFKSNFDLSE | |
| | DAKLQLSKDTYDDDLEELLGQIGDQYADLFLAAKNLSDAILLSGILRVSTES | |
| | TKAPLSASMIKRYDEHHQDLTLLKDLVRKQLPEKYKEIFFDQSKNGYAGYID | |
| | GGASQEEFYKYIKPILEKMDGTEELLDKLEREDLLRKQRTFDNGSIPHQIHL | |
| | GELHAILRRQEKYYPFLKENREKIEKILTFRIPYYVGPLARGNSRFAWMSRK | |
| | SDETITPWNFEEVVDKGASAEAFIERMTNFDKNLPDEKVLPKHSLLYEYFTV | |
| | YNELTKVKYVTEGMRKPEFLDGEQKKEIVDLLFKKNRKVTVKQLKEDYFKKF | |
| | ECFDIVEISGVEDRFNASLGTYHDLLKIIKDKEFLDNEENEEILEDIVLTLT | |
| | LFEDREMIKERLEKYADLFDKKVMKQLKRRRYTGWGRLSKKLINGIRDKQSG | |
| | KTILDFLKADGFANRNFMQLIHDDSLTFKDEIEKAQVTGDGESLHEHIANLA | |
| | GSPAIKKGILQTVKVVDELVKVMGRHKPENIVIEMARENQTTQKGQKNSRER | |
| | MKRIEEGIKELGSQILKEHPVENTQLQNEKLYLYYLQNGRDMYVDQELDINR | |
| | LSDYDVDHIVPQSFLKDDSIDNKVLTRSDKARGKSDNVPSEEVVKKMKNYWR | |
| | QLLNAKLITQRKFDNLTKAERGGLSELDKAGFIKRQLVETRQITKHVAQILD | |
| | SRMNTEYDENDKLIRDVKVITLKSKLVSDFRKDFQFYKVREINNYHHAHDAY | |
| | LNAVVGTALIKKYPKLESEFVYGDYKVYDVRKMIAKSEQEIGKATAKYFFYS | |
| | NIMNFFKTEITLANGEIRKRPLIEVNEETGEIVWDKEKDFATVRKVLSMPQV | |
| | NIVKKTEVQTGGFSKESILPKRDSDKLIARKKDWDPKKYGGFDSPTVAYSVL | |
| | VVAKVEKGKTKKLKTVKELLGITIMERSAFEKNPVAFLEAKGYQEVKKDLII | |
| | KLPKYSLFELENGRKRMLASAGELQKGNELALPSKYVNFLYLASHYEKLKGS | |
| | PEDNEQKQEFVEQHKEYLDEIIDQISEFSKRVILADANLEKVKKAYEKHKDK | |
| | SIEEQAENIIHLFTLTALGAPAAFKYFGTTIDRKRYTSTKEVLNATLIHQSI | |
| | TGLYETRIDLSQLGGD | |
| CasEnd-72 | MKKKYSIGLDIGTNSVGWAVITDEYKVPSKKFKVLGNTDRQSIKKNLIGALL | 32 |
| | FDSGETAEATRLKRTARRRYTRRKNRIRYLQEIFAEEMSKVDDSFFHRLEES | |
| | FLVEEDKKHERHPIFGNIVDEVAYHEKYPTIYHLRKKLVDSTEKADLRLIYL | |
| | ALAHMIKFRGHFLIEGDLNSENSDVDKLFIQLVQTYNQLFEENPINEEGVDA | |
| | KAILSAKLSKSRRLENLIAQFPGEKKNGLFGNLIALSLGLTPNFKSNEDLAE | |
| | DAKLQLSKDTYDDDLENLLAQIGDQYADLFLAAKNLSDAILLSDILRVNTEI | |
| | TKAPLSASMIKRYDEHHQDLTLLKALVRQQLPEKYKEIFFDESKNGYAGYID | |
| | GGASQEEFYKFIKPILEKMDGTEELLAKLNREDLLRKQRTFDNGSIPHQIHL | |
| | GELHAILRRQEDFYPFLKENREKIEKILTFRIPYYVGPLARGNSRFAWMTRK | |
| | SEETITPWNFEEVVDKGASAQSFIERMTNFDKNLPNEKVLPKHSLLYEYFTV | |
| | YNELTKVKYVTEGMGKPEFLSGEQKKEIVDLLFKKNRKVTVKQLKEDYFKKI | |
| | ECFDSVEISGVEDRFNASLGTYHDLLKIIKDKDELDNEENEDILEDIVLTLT | |
| | LFEDREMIEERLKKYANLFDDKVMKKLKRRRYTGWGRLSRKLINGIRDKQSG | |
| | KTILDFLKSDGFANRNFMQLIHDDSLTFKEAIKKAQVSGQGDSLHEQIANLA | |
| | GSPAIKKGILQTVKVVDELVKVMGRHKPENIVIEMARENQTTQKGQKNSRER | |
| | MKRIEEGIKELGSQILKEHPVENTQLQNEKLYLYYLQNGRDMYTGQELDINR | |
| | LSDYDVDHIVPQSFLKDDSIDNKVLTRSEEARGKSDNVPSEEVVKKMKPYWR | |
| | QLLKAKLITQRKFDNLTKAERGGLSELDKAGFIKRQLVETRQITKHVAQILD | |
| | SRMNTKRDENDKLIRDVKVITLKSKLVSDERKDFQFYKVREINNYHHAHDAY | |
| | LNAVVGTALIKKYPKLESEFVYGDYKVYDVRKMIAKSEQEIGKATAKYFFYS | |
| | NIMNFFKSEIKLANGEIRKRPLIETNEETGEIVWDKERDFATVRKVLSMPQV | |
| | NIVKKTEVQTGGFSKESILPKRNSDKLIARKKDWDPKKYGGFDSPTVAYSVL | |
| | VVAKVEKGKAKKLKTVKELLGITIMERSSFEKDPVAFLEAKGYKDVKKDLII | |
| | KLPKYSLFELENGRKRMLASAGELQKGNELALPSKYVNFLYLASHYEKLKGS | |
| | PEDNEQKQLYVEQHKNYLDEIIDQISEFSERVILADKNLEKVLSAYNEFRDK | |
| | PIEEQAENIIHLFTLTNLGAPAAFKYFDKTIDRKRYTSTKEVLDATLIHQSI | |
| | TGLYETRIDLSQLGGD | |
| CasEnd-73 | MDKKYSIGLDIGTNSVGWAVITDEYKVPSKKFKVLGNTDRHSIKKNLIGALL | 33 |
| | FDSGETAEATRLKRTARRRYTRRKNRICYLQEIFSNEMAKVDDSFFHRLEES | |
| | FLVEEDKRHERHPIFGNIVDEVAYHEKYPTIYHLRKKLADSTEKADLRLIYL | |
| | ALAHMIKFRGHFLIEGDLNSDNSDVDKLFIQLVQTYNQLFEENPINASGVDA | |
| | KAILSARLSKSRRLENLIAQLPGEKKNGLFGNLIALSLGLTPNFKSNEDLAE | |
| | DAKLQLSKDTYDDDLDNLLAQIGDQYADLFLAAKNLSDAILLSDILRVNTEI | |
| | TKAPLSASMIKRYDEHHQDLTLLKALVRQQLPEKYKEIFFDQSKNGYAGYID | |
| | GGASQEEFYKFIKPILEKMDGTEELLVKLNREDLLRKQRTFDNGSIPHQIHL | |
| | GELHAILRRQEDFYPFLKDNREKIEKILTFRIPYYVGPLARGNSRFAWMTRK | |
| | SEETITPWNFEEVVDKGASAQSFIERMTNFDKNLPNEKVLPKHSLLYEYFTV | |
| | YNELTKVKYVTEGMRKPAFLSGEQKKAIVDLLFKTNRKVTVKQLKEDYFKKI | |
| | ECFDSVEISGVEDRFNASLGTYHDLLKIIKDKDFLDNEENEDILEDIVLTLT | |
| | LFEDREMIEERLKTYAHLFDDKVMKQLKRRRYTGWGRLSRKLINGIRDKQSG | |
| | KTILDFLKSDGFANRNFMQLIHDDSLTFKEDIQKAQVSGQGESLHEQIANLA | |
| | GSPAIKKGILQTIKIVDELVKVMGRHAPENIVIEMARENQTTQKGQKNSRER | |
| | MKRIEEGIKELGSQILKEHPVENTQLQNEKLYLYYLQNGRDMYVDQELDINR | |
| | LSDYDVDHIVPQSFLKDDSIDNKVLTRSDKARGKSDNVPSEEVVKKMKNYWR | |
| | QLLNAKLITQRKFDNLTKAERGGLSELDKAGFIKRQLVETRQITKHVAQILD | |
| | SRFNTEYDDNDKLIRDVKIITLKSKLVSDFRKDFGLYKVREINNYHHAHDAY | |
| | LNAVVGTALIKKYPKLESEFVYGDYKVYDVRKMIAKSDKEIGKATAKYFFYS | |
| | NIMNFFKTDVTLANGEIRKRPLIEVNEETGEIVWDKEKDFATVRKVLSMPQV | |
| | NIVKKTEVQTGGFSKESILPKRNSDKLIARKKDWDTKKYGGFDSPTVAYSVL | |
| | VIAKVEKGKAKKLKTVKELVGITIMERSAFEKDPVAFLEAKGYQDIQKDLII | |
| | KLPKYSLFELENGRKRMLASAGELQKGNELALPQKYVTLLYLASKYEKLKGS | |
| | EEDNEKKQLYVEQHKEYFDEIMDQISEFAKRYILADANLEKIKSLYEKNFDA | |
| | SIEELAENFIHLLTFTNLGAPAAFKFFDTTIDRKRYTSTKEILNATLIHQSI | |
| | TGLYETRIDLSQLGGD | |
| CasEnd-74 | MDKKYSIGLDIGTNSVGWAVITDEYKVPSKKFKVLGNTDRQSIKKNLIGALL | 34 |
| | FDSGETAEATRLKRTARRRYTRRKNRIRYLQEIFSEEMSKVDDSFFHRLEES | |
| | FLVEEDKKHERHPIFGNIVDEVAYHEKYPTIYHLRKKLADSTEKADLRLIYL | |
| | ALAHMIKFRGHFLIEGDLNPDNSDVDKLFIQLVQTYNQLFEENPINESGVDA | |
| | KAILSARLSKSRRLENLIAQLPGEKKNGLFGNLIALSLGLTPNFKSNEDLAE | |
| | DAKLQLSKDTYDEDLDNLLAQIGDQYADLFLAAKNLSDAILLSDILTVNSEI | |
| | TKAPLSASMIKRYDEHHQDLTLLKALVRQQLPEKYKEIFFDQSKNGYAGYID | |
| | GGASQEEFYKFIKPILEKMDGTEELLAKLNREDFLRKQRTFDNGSIPHQIHL | |
| | GELHAILRRQEDFYPFLKENREKIEKILTFRIPYYVGPLARGNSRFAWMTRK | |
| | SEETITPWNFEEVVDKGASAQAFIERMTNFDKNLPTEKVLPKHSLLYEYFTV | |
| | YNELTKVKYVTEGMGKPEFLSGEQKQEIVDLLFKKNRKVTVKQLKEDYFKKI | |
| | ECFDSVEISGVEDRFNASLGTYHDLLKIIKDKDELDNEENEDILEDIVLTLT | |
| | LFEDREMIEERLKKYANLFDDKVLKQLKRRRYTGWGRLSKKLINGIRDKQSG | |
| | KTILDFLKSDGFANRNFMQLIHDDSLTFKEEIKKAQVSGQGDSLHEQIANLA | |
| | GSPAIKKGILQTVKIVDELVKVMGRHKPENIVIEMARENQTTQKGQKNSRER | |
| | MKRLEEGLKELGSQILKEHPVENTQLQNEKLYLYYLQNGKDMYTGQELDIDR | |
| | LSDYDVDHIIPQSFIKDDSIDNKVLTSSDKARGKSDDVPSEEVVKKMKNYWR | |
| | QLLNAKLISQRKFDNLTKAERGGLSELDKAGFIKRQLVETRQITKHVAQILD | |
| | SRMNTEYDENDKLIRDVKIITLKSKLVSDFRKDFQFYKVREINNYHHAHDAY | |
| | LNAVVGTALIKKYPKLESEFVYGDYKVYDVRKMIAKSEQEIGKATAKRFFYS | |
| | NIMNFFKTEITLANGEIRKRPLIETNEETGEIVWDKEKDFATVRKVLSMPQV | |
| | NIVKKTEVQTGGFSKESILPKRNSDKLIARKKDWDTKKYGGFDSPTVAYSVL | |
| | VVAKVEKGKSKKLKTVKELVGITIMERSSFEKDPVAFLEAKGYKEVQKDLII | |
| | KLPKYSLFELENGRKRMLASAGELQKGNELALPSKYVTFLYLASHYEKLKGS | |
| | PEDNEKKQLFVEQHKHYFDEILDQISEFSKRYILADKNLDKVLSLYNKFRDK | |
| | SIREQAESIINLFTLTNLGAPAAFKFFDTTIDRKRYTSTKEILDSTLIHQSI | |
| | TGLYETRIDLSQLGGD | |
| CasEnd-75 | MDKKYSIGLDIGTNSVGWAVITDEYKVPSKKFKVLGNTDRHSIKKNLIGALL | 35 |
| | FDSGETAEATRLKRTARRRYTRRKNRICYLQEIFSNEMAKVDDSFFHRLEES | |
| | FLVEEDKKNERHPIFGNIVDEVAYHEKYPTIYHLRKKLADSTEKADLRLIYL | |
| | ALAHMIKFRGHFLIEGDLNSDNSDVQKLFIQLVQTYNQLFEENPLNESGVDA | |
| | KAILSARLSKSRRLENLIAQFPGEKKNGLFGNLIALSLGLTPNFKSNFDLAE | |
| | DAKLQLSKDTYDEDLENLLAQIGDQYADLFLAAKNLSDAILLSDILTVNDEI | |
| | TKAPLSASMVKRYDEHHQDLTLLKALVRQQLPEKYKEIFFDQSKNGYAGYID | |
| | GGASQEEFYKYIKPILEKIDGSEEFLAKINREDFLRKQRTFDNGSIPHQIHL | |
| | GELHAILRRQEDYYPFLKDNREKIEKILTFRIPYYVGPLARGNSRFAWMTRK | |
| | SEETITPWNFEEVVDKEASAQSFIERMTNFDKNLPNEKVLPKHSLLYEYFTV | |
| | YNELTKVKYVTEGMRKPEFLSGEQKQEIVDLLFKKNRKVTVKQLKEYLFKKI | |
| | ECFDSVEISGVEDRFNASLGTYHDLLKIIKDKDFLDNEENEKILEDIVLTLT | |
| | LFEDREMIEERLKKYAHLFDDKVLKQLKRRRYTGWGRLSRKLINGIRDKQSG | |
| | KTILDFLKSDGFANRNFMQLIHDDSLTFKEEIKKAQVSGQGDSLHEHIANLA | |
| | GSPAIKKGILQTVKVVDELVKVMGRHKPENIVIEMARENQTTQKGQKNSRER | |
| | MKRIEEGIKELGSQILKEHPVENTQLQNEKLYLYYLQNGRDMYVDQELDINR | |
| | LSDYDVDHIVPQSFLKDDSIDNKVLTRSDKARGKSDNVPSEEVVKKMKNYWR | |
| | QLLNAKLITQRKFDNLTKAERGGLSELDKAGFIKRQLVETRQITKHVAQILD | |
| | SRMNTKYDENDKLIREVKVITLKSKLVSDFRKDFQFYKVREINNYHHAHDAY | |
| | LNAVVGTALIKKYPKLESEFVYGDYKVYDVRKMIAKSEQEIGKATAKYFFYS | |
| | NIMNFFKTEITLANGEIRKRPLIETNGETGEIVWDKGRDFATVRKVLSMPQV | |
| | NIVKKTEVQTGGFSKESILPKRNSDKLIARKKDWDPKKYGGFDSPTVAYSVL | |
| | VVAKVEKGKAKKLKTVKELVGITIMERSSFEKNPVAFLEAKGYKEVQKDLII | |
| | KLPKYSLFELENGRKRLLASAGELQKGNELALPNKYVTLLYLASHYEKLKGS | |
| | PEDNEQKQLFVEQHKHYFDEIIEQISEFSKRVILADANLEKILSLYNKNRDA | |
| | SIEEQAENFIHLLTFTNLGAPAAFKFFDTTIDRKRYTSTKEILDATLIHQSI | |
| | TGLYETRIDLSQLGGD | |
| CasEnd-76 | MDKKYSIGLDIGTNSVGWAVITDEYKVPSKKFKVLGNTDRQSIKKNLIGALL | 36 |
| | FDSGETAEATRLKRTARRRYTRRKNRIRYLQEIFSNEMAKVDDSFFHRLEES | |
| | FLVEEDKKHERHPIFGNIVDEVAYHENYPTIYHLRKKLADSTEKADLRLIYL | |
| | ALAHMIKFRGHFLIEGDLNSDNSDVDKLFIQLVQTYNQLFEENPINESGVDA | |
| | KAILSAKLSKSRRLENLIAQLPGEKKNGLFGNLIALSLGLTPNFKSNFDLAE | |
| | DAKLQLSKDTYDDDLENLLAQIGDQYADLFLAAKNLSDAILLSDILTVNSEI | |
| | TKAPLSASMIKRYDEHHQDLTLLKALVRQQLPEKYKEIFFDQSKNGYAGYID | |
| | GGASQEEFYKYIKPILEKMDGTEELLAKLNREDFLRKQRTFDNGSIPHQIHL | |
| | GELHAILRRQEEFYPFLKENREKIEKILTFRIPYYVGPLARGNSRFAWMTRK | |
| | SEETITPWNFEEVVDKGASAQAFIERMTNFDKNLPNEKVLPKHSLLYEYFTV | |
| | YNELTKVKYVTEGMRKPEFLSGEQKKEIVDLLFKKNRKVTVKQLKEDYFKKI | |
| | ECFDSVEISGVEDRFNASLGTYHDLLKIIKDKDFLDNEENEDILEDIVLTLT | |
| | LFEDREMIEERLKKYAHLFDDKVLKQLKRRRYTGWGRLSKKLINGIRDKQSG | |
| | KTILDFLKSDGFANRNFMQLIHDDSLTFKEDIKKAQVSGQGDSLHEQIANLA | |
| | GSPAIKKGILQTVKIVDELVKVMGRHKPENIVIEMARENQTTQKGQKNSRER | |
| | MKRIEEGLKELGSQILKEHPVENTQLQNEKLYLYYLQNGKDMYTGDELDIDR | |
| | LSDYDVDHIIPQSFIKDDSIDNKVLTSSAEARGKSDNVPSEEVVKKMKSYWR | |
| | QLLKAKLISQRKFDNLTKAERGGLSELDKAGFIKRQLVETRQITKHVAQILD | |
| | SRMNTKRDENDKLIRDVKIITLKSKLVSDFRKDFQFYKVREINNYHHAHDAY | |
| | LNAVVGTALIKKYPKLESEFVYGDYKVYDVRKMIAKSEQEIGKATAKRFFYS | |
| | NIMNFFKTEITLANGEIRKRPLIETNEETGEIVWDKEKDFATVRKVLSMPQV | |
| | NIVKKTEVQTGGFSKESILPKRNSDKLIARKKDWDPKKYGGFDSPTVAYSVL | |
| | VVAKVEKGKTKKLKTVKELVGITIMERSSFEKDPVKFLEAKGYKEIQKDLII | |
| | KLPKYSLFELENGRKRLLASAGELQKGNELALPSKYVTFLYLASHYEKLKGS | |
| | PEDNEQKQLFVEQHKHYFDEILDQISEFSKRYILADKNLDKVLSLYNKFRDK | |
| | SISEQAENFINLFTLTNLGAPAAFKFFDTTIDRKRYTSTKEILDSTLIHQSI | |
| | TGLYETRIDLSQLGGD | |
| CasEnd-77 | MKKKYSIGLDIGTNSVGWAVITDEYKVPSKKFKVLGNTDRHSIKKNLIGALL | 37 |
| | FDSGETAEATRLKRTARRRYTRRKNRIRYLQEIFSEEMAKVDDSFFHRLEES | |
| | FLVEEDKKHERHPIFGNIVDEVAYHEKYPTIYHLRKELADSTEKADLRLIYL | |
| | ALAHMIKFRGHFLIEGDLNPDNSDVDKLFIQLVQTYNQLFEENPINESGVDA | |
| | KAILSAKLSKSRRLENLIAQLPGEKKNGLFGNLIALSLGLTPNFKSNEDLAE | |
| | DAKLQLSKDTYDDDLENLLAQIGDQYADLFLAAKNLSDAILLSDILTVNSEI | |
| | TKAPLSASMIKRYDEHHQDLTLLKALVRQQLPEKYKEIFFDKSKNGYAGYID | |
| | GGASQEEFYKFIKPILEKMDGTEELLAKLNREDFLRKQRTFDNGSIPHQIHL | |
| | GELHAILRRQEEFYPFLKENREKIEKILTFRIPYYVGPLARGNSRFAWMTRK | |
| | SEETITPWNFEEVVDKGASAQAFIERMTNFDKNLPEEKVLPKHSLLYEYFTV | |
| | YNELTKVKYVTEGMKKPEFLSGEQKQEIVDLLFKKNRKVTVKQLKEDYFKKI | |
| | ECFDSVEISGVEDRFNASLGTYHDLLKIIKDKDELDNEENEDILEDIVLTLT | |
| | LFEDKEMIEERLKKYANLFDDKVLKQLKRRRYTGWGRLSRKLINGIRDKQSG | |
| | KTILDFLKSDGFANRNFMQLIHDDSLTFKEEIQKAQVSGQGDSLHEQIANLA | |
| | GSPAIKKGILQTVKIVDELVKVMGRHKPENIVIEMARENQTTQKGQKNSRER | |
| | MKRIEEGIKELGSQILKEHPVENTQLQNEKLYLYYLQNGKDMYTGQELDIDR | |
| | LSDYDVDHIIPQSFIKDDSIDNKVLTSSKEARGKSDNVPSEEVVKKMKSYWR | |
| | QLLKAKLISQRKFDNLTKAERGGLSELDKAGFIKRQLVETRQITKHVAQILD | |
| | SRFNTERDENDKLIRDVKIITLKSKLVSDFRKDFQFYKVREINNYHHAHDAY | |
| | LNAVVGTALIKKYPKLESEFVYGDYKVYDVRKMIAKSEQEIGKATAKYFFYS | |
| | NIMNFFKSEITLANGEIRKRPLIETNEETGEIVWDKEKDFATVRKVLSMPQV | |
| | NIVKKTEVQTGGFSKESILPKRNSDKLIARKKDWDPKKYGGFDSPTVAYSVL | |
| | VVAKVEKGKTKKLKTVKELVGITIMERSSFEKDPIAFLEAKGYKEVQKDLII | |
| | KLPKYSLFELENGRKRMLASAGELQKGNELALPSKYVTFLYLASHYEKLKGS | |
| | PEDNEQKQLFVEQHKHYFDEILEQISEFSKRYILADKNLEKILSLYNNFEDK | |
| | SIREQAENIINLETLTNLGAPAAFKFFDTTIDRKRYTSTKEILDATLIHQSI | |
| | TGLYETRIDLSQLGGD | |
| CasEnd-78 | MKKKYSIGLDIGTNSVGWAVITDEYKVPSKKFKVLGNTDRHSIKKNLIGALL | 38 |
| | FDSGETAEATRLKRTARRRYTRRKNRIRYLQEIFSEEMAKVDDSFFHRLEES | |
| | FLVEEDKKHERHPIFGNIVDEVAYHEKYPTIYHLRKKLADSTEKADLRLIYL | |
| | ALAHMIKFRGHFLIEGDLNSDNSDVDKLFIQLVQTYNQLFEENPINEEGVDA | |
| | KAILSAKLSKSRRLENLIAQLPGEKKNGLFGNLIALSLGLTPNFKSNEDLAE | |
| | DAKLQLSKDTYDEDLENLLAQIGDQYADLFLAAKNLSDAILLSDILTVNSEI | |
| | TKAPLSASMIKRYDEHHQDLTLLKKLVRQQLPEKYKEIFFDQSKNGYAGYID | |
| | GGASQEEFYKYIKPILEKMDGTEELLAKLNREDFLRKQRTFDNGSIPHQIHL | |
| | GELHAILRRQEDFYPFLKENREKIEKILTFRIPYYVGPLARGNSRFAWMTRK | |
| | SEETITPWNFEEVVDKGASAQSFIERMTNFDKNLPNEKVLPKHSLLYEYFTV | |
| | YNELTKVKYVTEGMRKPEFLSGEQKQEIVDLLFKKNRKVTVKQLKEDYFKKI | |
| | ECFDSVEISGVEDRFNASLGTYHDLLKIIKDKDFLDNEENEDILEDIVLTLT | |
| | LFEDKEMIEERLKKYANLFDKKVLKQLKRRRYTGWGRLSKKLINGIRDKQSG | |
| | KTILDFLKSDGFANRNFMQLIHDDSLTFKEAIQKAQVSGQGDSLHEQIANLA | |
| | GSPAIKKGILQTVKIVDELVKVMGRHKPENIVIEMARENQTTQKGQKNSRER | |
| | MKRLEEGIKELGSQILKEHPVENTQLQNDKLYLYYLQNGKDMYTGKELDIDR | |
| | LSDYDVDHIIPQSFIKDDSIDNKVLTRSAKARGKSDNVPSEEVVKKMKSYWR | |
| | QLLNAKLISQRKFDNLTKAERGGLTELDKAGFIKRQLVETRQITKHVAQILD | |
| | SRFNTEYDENDKLIREVKIITLKSKLVSDFRKDFQFYKVREINDYHHAHDAY | |
| | LNAVVGTALIKKYPKLESEFVYGDYKVYDVRKMIAKSEQEIGKATAKRFFYS | |
| | NIMNFFKTEITLANGEIRKRPLIETNEETGEIVWDKEKDFATVRKVLSMPQV | |
| | NIVKKTEVQTGGFSKESILPKRNSDKLIARKKDWDPKKYGGFDSPTVAYSVL | |
| | VVAKVEKGKSKKLKTVKELVGITIMERSSFEKDPVDFLEAKGYKEIQKDLII | |
| | KLPKYSLFELENGRKRMLASAGELQKGNELALPSKYVTFLYLASHYEKLKGK | |
| | PEDNEQKQLYVEQHRHYFDEIVEQISEFSKRYILADKNLEKVLSLYNNKRDK | |
| | SIREQAESIINLFTLTALGAPAAFKFFDTTIDRKRYTSTKEVLDATLIHQSI | |
| | TGLYETRIDLSQLGGD | |
| CasEnd-79 | MKKKYSIGLDIGTNSVGWAVITDEYKVPSKKFKVLGNTDRQSIKKNLIGALL | 39 |
| | FDSGETAEATRLKRTARRRYTRRKNRIRYLQEIFAEEMAKVDDSFFHRLEES | |
| | FLVEEDKKNERHPIFGNIVDEVAYHENYPTIYHLRKELVDSDEKADLRLIYL | |
| | ALAHMIKFRGHFLIEGDLNSENSDVQKLFIQLVQTYNQLFEENPLDEEGVDA | |
| | KAILSAKLSKSRRLENLIAQFPNEKKNGLFGNLIALSLGLTPNFKSNFGLSE | |
| | DAKLQLSKDTYDEDLENLLAQIGDQYADLFLAAKNLSDAILLSGILRVNSEI | |
| | TKAPLSASMIKRYDEHHQDLTLLKALVRQQLPEKYKEIFFDKSKNGYAGYID | |
| | GGASQEEFYKYIKPILEKMDGTEYLLAKLNREDLLRKQRTFDNGSIPHQIHL | |
| | GELHAILRRQEEYYPFLKENQEKIEKILTFRIPYYVGPLARGNSRFAWMTRK | |
| | SDETITPWNFEEVVDKGASAQAFIERMTNFDKNLPTEKVLPKHSLLYEYFTV | |
| | YNELTKVKYVTEGMGKPEFLSSEQKKEIVDLLFKKNRKVTVKQLKEFYFKEI | |
| | ECFDSVEISGVEDRFNASLGTYHDLLKIIKDKDFLDDEENEDILEDIVLTLT | |
| | LFEDREMIEKRLKKYANLFDKKVMKKLKRRRYTGWGRLSKKLINGIRDKQSG | |
| | KTILDFLKDDGFANRNFMQLIHDDSLTFKEEIKKAQVIGQGESLHEQIADLA | |
| | GSPAIKKGILQTVKVVDELVKVMGRHKPENIVIEMARENQTTQKGQRNSRER | |
| | MKRIEEGIKELGSDILKEHPVENTQLQNDKLYLYYLQNGRDMYTGDELDIDR | |
| | LSDYDVDHIVPQSFIKDDSIDNKVLTRSEKARGKSDDVPSEEVVKKMKSYWR | |
| | QLLKAKLITQRKFDNLTKAERGGLTELDKAGFIKRQLVETRQITKHVAQILD | |
| | SRMNTERDENDKLIRDVKVITLKSKLVSDFRKDFQFYKVREINDYHHAHDAY | |
| | LNAVVGTALIKKYPKLESEFVYGDYKVYDSRKMIAKSEQEIGKATAKYFFYS | |
| | NIMNFFKTEITLANGEIRKRPLIETNGETGEIVWDKGRDFATVRKVLSMPQV | |
| | NIVKKTEVQTGGFSKESILPKRNSDKLIARKKDWDPKKYGGFDSPTVAYSVL | |
| | VVAKVEKGKSKKLKSVKELLGITIMERSSFEKNPIDFLEAKGYKEVKKDLII | |
| | KLPKYSLFELENGRKRMLASAGELQKGNELALPSKYVNFLYLASHYEKLKGS | |
| | PEDNEQKQLFVEQHKHYLDEIIEQISEFSKRVILADANLDKVLSAYNKHRDK | |
| | PIREQAENIIHLFTLTNLGAPAAFKYFDTTIDRKRYTSTKEVLDATLIHQSI | |
| | TGLYETRIDLSQLGGD | |
| CasEnd-80 | MDKKYSIGLDIGTNSVGWAVITDEYKVPSKKFKVLGNTDRQSIKKNLLGALL | 40 |
| | FDSGETAEATRLKRTARRRYTRRKNRICYLQEIFAEEMAKVDDSFFHRLEES | |
| | FLVEEDKKHERHPIFGNIVDEVAYHEKYPTIYHLRKKLADSTEKADLRLIYL | |
| | ALAHMIKFRGHFLIEGDLNSDNSDVDKLFIQLVQTYNQLFEENPINESGVDA | |
| | KAILSAKLSKSRRLENLIAQFPGEKKNGLFGNLIALSLGLTPNFKSNEDLSE | |
| | DAKLQLSKDTYDEDLDNLLAQIGDQYADLFLAAKNLSDAILLSDILTVNSEI | |
| | TKAPLSASMIKRYDEHHQDLTLLKALVRQQLPEKYKEIFFDQSKNGYAGYID | |
| | GGASQEEFYKYIKPILEKMDGTEELLAKLNREDFLRKQRTFDNGSIPHQIHL | |
| | GELHAILRRQEAFYPFLKENREKIEKILTFRIPYYVGPLARGNSRFAWMTRK | |
| | SEETITPWNFEEVVDKGASAQSFIERMTNFDKNLPNEKVLPKHSLLYEYFTV | |
| | YNELTKVKYVTEGMRKPEFLSGEQKKEIVDLLFKKNRKVTVKQLKEDYFKKI | |
| | ECFDSVEISGVEDRFNASLGTYHDLLKIIKDKDFLDNEENEDILEDIILTLT | |
| | LFEDREMIEERLKKYAHLFDDKVMKQLKRRRYTGWGRLSRKLINGIRDKQSG | |
| | KTILDFLKSDGFANRNFMQLIHDDSLTFKEEIQKAQVSGQGDSLHEQIANLA | |
| | GSPAIKKGILQTVKIVDELVKVMGRHKPENIVIEMARENQTTQKGQKNSRER | |
| | MKRIEEGIKELGSQILKEHPVENTQLQNEKLYLYYLQNGKDMYTGQELDIDR | |
| | LSDYDVDHIIPQSFIKDDSIDNKVLTSSKEARGKSDNVPSEEVVKKMKSYWR | |
| | QLLKAKLISQRKFDNLTKAERGGLSELDKAGFIKRQLVETRQITKHVAQILD | |
| | SRFNTERDENDKLIRDVKIITLKSKLVSDFRKDFQFYKVREINNYHHAHDAY | |
| | LNAVVGTALIKKYPKLESEFVYGDYKVYDVRKMIAKSEQEIGKATAKRFFYS | |
| | NIMNFFKTEIKLANGEIRKRPLIETNEETGEIVWDKEKDFATVRKVLSMPQV | |
| | NIVKKTEVQTGGFSKESILPKRESDKLIARKKDWDPKKYGGFDSPTVAYSVL | |
| | VVAKVEKGKSKKLKPVKELVGITIMERSSFEKNPVKFLEAKGYKDVQKDLII | |
| | KLPKYSLFELENGRKRMLASAGELQKGNELALPSKYVTFLYLASHYEKLKGS | |
| | PEDNEKKQLFVEQHKHYLDEIIEQISEFSKRYILADKNLDKILSLYNKNRDK | |
| | SIREQAENIINLFTLTALGAPAAFKFFDTTIDRKRYTSTKEILNSTLIHQSI | |
| | TGLYETRIDLSQLGGD | |
| CasEnd-81 | MDKKYSIGLDIGTNSVGWAVITDEYKVPSKKFKVLGNTDRHSIKKNLIGALL | 41 |
| | FDSGETAEATRLKRTARRRYTRRKNRIRYLQEIFANEMAKVDDSFFHRLEES | |
| | FLVEEDKKHERHPIFGNIVDEVAYHEKYPTIYHLRKKLADSTEKADLRLIYL | |
| | ALAHMIKFRGHFLIEGDLNSDNSDVDKLFIQLVQTYNQLFEENPINESGVDA | |
| | KAILSARLSKSRRLENLIAQLPGEKKNGLFGNLIALSLGLTPNFKSNFDLAE | |
| | DAKLQLSKDTYDDDLDNLLAQIGDQYADLFLAAKNLSDAILLSDILTVNSEI | |
| | TKAPLSASMIKRYDEHHQDLTLLKALVRQQLPEKYKEIFFDKSKNGYAGYID | |
| | GGASQEEFYKFIKPILEKMDGTEELLAKLNREDFLRKQRTFDNGSIPHQIHL | |
| | GELHAILRRQEDFYPFLKENREKIEKILTFRIPYYVGPLARGNSRFAWMTRK | |
| | SEETITPWNFEEVVDKGASAQSFIERMTNFDKNLPNEKVLPKHSLLYEYFTV | |
| | YNELTKVKYVTEGMRKPEFLSGEQKKEIVDLLFKKNRKVTVKQLKEDYFKKI | |
| | ECFDSVEISGVEDRFNASLGTYHDLLKIIKDKDFLDNEENEDILEDIVLTLT | |
| | LFEDKEMIEERLKKYAHLFDDKVMKQLKRRRYTGWGRLSRKLINGIRDKQSG | |
| | KTILDFLKSDGFANRNFMQLIHDDSLTFKEEIQKAQVSGQGDSLHEQIANLA | |
| | GSPAIKKGILQTVKIVDELVKVMGRHKPENIVIEMARENQTTQKGQKNSRER | |
| | MKRIEEGIKELGSQILKEHPVENTQLQNEKLYLYYLQNGKDMYTGQELDIDR | |
| | LSDYDVDHIIPQSFIKDDSIDNKVLTSSDKARGKSDDVPSEEVVKKMKNYWR | |
| | QLLNAKLISQRKFDNLTKAERGGLSELDKAGFIKRQLVETRQITKHVAQILD | |
| | SRMNTERDENDKLIRDVKIITLKSKLVSDFRKDFQFYKVREINNYHHAHDAY | |
| | LNAVVGTALIKKYPKLESEFVYGDYKVYDVRKMIAKSEQEIGKATAKRFFYS | |
| | NIMNFFKTEITLANGEIRKRPLIETNEETGEIVWDKEKDFATVRKVLSMPQV | |
| | NIVKKTEVQTGGFSKESILPKRDSDKLIARKKDWDPKKYGGFDSPTVAYSVL | |
| | VVAKVEKGKSKKLKTVKELVGITIMERSSFEKDPVDFLEAKGYKEVQKDLII | |
| | KLPKYSLFELENGRKRLLASAGELQKGNELALPSKYVTFLYLASHYEKLKGS | |
| | PEDNEQKQLFVEQHKHYLDEIVDQISEFSKRYILADKNLDKILSLYNKHRDK | |
| | PISEQAENIINLETLTNLGAPAAFKFFDTTIDRKRYTSTKEILDATLIHQSI | |
| | TGLYETRIDLSQLGGD | |
| CasEnd-82 | MDKKYSIGLDIGTNSVGWAVITDEYKVPSKKFKVLGNTDRHSIKKNLIGALL | 42 |
| | FDSGETAEATRLKRTARRRYTRRKNRICYLQEIFSNEMAKVDDSFFHRLEES | |
| | FLVEEDKKHERHPIFGNIVDEVAYHEKYPTIYHLRKELADSTEKADLRLIYL | |
| | ALAHIIKFRGHFLIEGDLNSENSDVQKLFIQLVQTYNQLFEENPINEEGVDA | |
| | KAILSAKLSKSRRLENLIAQFPGEKKNGLFGNLIALSLGLTPNFKSNEDLAE | |
| | DAKLQLSKDTYDEDLDNLLAQIGDQYADLFLAAKNLSDAILLSDILTVNDEI | |
| | TKAPLSASMIKRYDEHHQDLTLLKALVRQQLPEKYKEIFFDKSKNGYAGYID | |
| | GGASQEEFYKFIKPILEKMDGTEELLAKLNREDFLRKQRTFDNGSIPHQIHL | |
| | GELHAILRRQEDFYPFLKENREKIEKILTFRIPYYVGPLARGNSRFAWMTRK | |
| | SEETITPWNFEEVVDKEASAQAFIERMTNFDKNLPTEKVLPKHSLLYEYFTV | |
| | YNELTKVKYVTEGMRKPEFLSGEQKKEIVDLLFKKNRKVTVKQLKEFLFKEI | |
| | ECFDSVEISGVEDRFNASLGTYHDLLKIIKDKDFLDNEENEDILEDIVLTLT | |
| | LFEDREMIEERLKKYADLFDKKVLKQLKRRRYTGWGRLSRKLINGIRDKQSG | |
| | KTILDFLKSDGFANRNFMQLIHDDSLTFKEEIKKAQVKGQGDSLHEHIANLA | |
| | GSPAIKKGILQTVKVVDELVKVMGRHKPENIVIEMARENQTTQKGQKNSRER | |
| | MKRIEEGIKELGSQILKEHPVENTQLQNEKLYLYYLQNGRDMYVDQELDINR | |
| | LSDYDVDHIVPQSFLKDDSIDNKVLTRSDKARGKSDNVPSEEVVKKMKNYWR | |
| | QLLNAKLITQRKFDNLTKAERGGLSELDKAGFIKRQLVETRQITKHVAQILD | |
| | SRMNTKYDENDKLIREVKVITLKSKLVSDFRKDFQFYKVREINNYHHAHDAY | |
| | LNAVVGTALIKKYPKLESEFVYGDYKVYDVRKMIAKSEQEIGKATAKYFFYS | |
| | NIMNFFKTEITLANGEIRKRPLIETNGETGEIVWDKGRDFATVRKVLSMPQV | |
| | NIVKKTEVQTGGFSKESILPKRNSDKLIARKKDWDTKKYGGFDSPTVAYSVL | |
| | VVAKIEKGKSKKLKTVKELVGITIMERSSFEKDPIAFLEAKGYKNVQKDLII | |
| | KLPKYSLFELENGRKRLLASAGELQKGNELALPAKYVTLLYHASHYEKLKGS | |
| | PEDNEQKLLYVEQHRHYFDEILEQISEFSKRYILADKNLDKILSLYNKFRDL | |
| | SIEEQASSFINLFTLTALGAPAAFKFFDTTIDRKRYTSTKEILDATLIHQSI | |
| | TGLYETRIDLSQLGGD | |
| CasEnd-83 | MKKKYSIGLDIGTNSVGWAVITDEYKVPSKKFKVLGNTDRHSIKKNLLGALL | 43 |
| | FDSGETAEATRLKRTARRRYTRRKNRIRYLQEIFAEEMAKVDDSFFHRLEES | |
| | FLVEEDKKHERHPIFGNIVDEVAYHEKYPTIYHLRKKLADSTEKADLRLIYL | |
| | ALAHMIKFRGHFLIEGDLNSDNSDVDKLFIQLVQTYNQLFEENPINEIGVDA | |
| | KAILSAKLSKSRRLENLIAQLPGEKKNGLFGNLIALSLGLTPNFKSNFDLAE | |
| | DAKLQLSKDTYDEDLENLLAQIGDQYADLFLAAKNLSDAILLSDILTVNDEI | |
| | TKAPLSASMIKRYDEHHQDLTLLKALVRQQLPEKYKEIFFDKSKNGYAGYID | |
| | GGASQEEFYKFIKPILEKMDGTEELLAKINREDFLRKQRTFDNGSIPHQIHL | |
| | GELHAILRRQEDFYPFLKENREKIEKILTFRIPYYVGPLARGNSRFAWMTRK | |
| | SEETITPWNFEEVVDKGASAQSFIERMTNFDKNLPNEKVLPKHSLLYEYFTV | |
| | YNELTKVKYVTEGMRKPEFLSGEQKQEIVDLLFKKNRKVTVKQLKEDYFKKI | |
| | ECFDSVEISGVEDRFNASLGTYHDLLKIIKDKDFLDNEENEDILEDIVLTLT | |
| | LFEDREMIEERLKKYAHLFDDKVLKQLKRRRYTGWGRLSRKLINGIRDKQSG | |
| | KTILDFLKSDGFANRNFMQLIHDDSLTFKEEIQKAQVSGQGDSLHEQIANLA | |
| | GSPAIKKGILQTVKIVDELVKVMGRHKPENIVIEMARENQTTQKGQKNSRER | |
| | MKRLEEGIKELGSQILKEHPVENTQLQNDKLYLYYLQNGKDMYTGEELDIDR | |
| | LSDYDVDHIIPQSFIKDDSIDNKVLTSSKKARGKSDNVPSEEVVKKMKSYWR | |
| | QLLNAKLISQRKFDNLTKAERGGLSELDKAGFIKRQLVETRQITKHVAQILD | |
| | SRMNTEYDENDKLIREVKIITLKSKLVSDFRKDFQFYKVREINNYHHAHDAY | |
| | LNAVVGTALIKKYPKLESEFVYGDYKVYDVRKMIAKSEQEIGKATAKRFFYS | |
| | NIMNFFKTEITLANGEIRKRPLIETNEETGEIVWDKEKDFATVRKVLSMPQV | |
| | NIVKKTEVQTGGFSKESILPKRNSDKLIARKKDWDPKKYGGEDSPTVAYSVL | |
| | VVAKVEKGKSKKLKTVKELVGITIMERSSFEKDPIDFLEAKGYKEVQKDLII | |
| | KLPKYSLFELENGRKRLLASAGELQKGNELALPSKYVTFLYLASHYEKLKGS | |
| | PEDNEKKQLYVEQHKHYFDEILEQISEFSERYILADKNLEKILSLYNKERDF | |
| | PIEEQAESIINLFTLTNLGAPAAFKFFGTTIDRKRYTSTKEILDATLIHQSI | |
| | TGLYETRIDLSQLGGD | |
| CasEnd-84 | MDKKYSIGLDIGTNSVGWAVITDEYKVPSKKFKVLGNTDRHSIKKNLLGALL | 44 |
| | FDSGETAEATRLKRTARRRYTRRKNRIRYLQEIFAEEMAKVDDSFFHRLEES | |
| | FLVEEDKRNERHPIFGNIVDEVAYHEKYPTIYHLRKKLADSDEKADLRLIYL | |
| | ALAHMIKFRGHFLIEGDLNSENSDVQKLFKQLVQTYNQLFEENPLNEEGVDA | |
| | KAILTARLSKSRRLENLIAQFPGEKKNGLFGNLIALSLGLTPNFKSNEDLAE | |
| | DAKLQLSKDTYDEDLENLLGQIGDQYADLFLAAKNLSDAILLSDILTVNDEI | |
| | TKAPLSASMVKRYDEHHQDLTLLKKLVRQQLPEKYKEIFFDQSKNGYAGYID | |
| | GGASQEEFYKYIKPILEKVDGSEEFLEKIEREDFLRKQRTFDNGSIPHQIHL | |
| | GELHAILRRQEEFYPFLKENREKIEKILTFRIPYYVGPLARGNSRFAWMTRK | |
| | SDETITPWNFEEVVDKEASAQKFIERMTNFDKNLPNEKVLPKHSLLYEKFTV | |
| | YNELTKVKYVTEGMRKPEFLSGEQKQEIVDLLFKKNRKVTVKQLKEDYFKKI | |
| | ECFDSVEISGVEDRFNASLGTYHDLLKIIKDKDFLDNEENEKILEDIVLTLT | |
| | LFEDREMIEERLKKYADLFDDKVLKQLKRRRYTGWGRLSRKLINGIRDKQSG | |
| | KTILDFLKSDGFANRNFMQLIHDDSLTFKEEIEKAQVSGQGESLHELIANLA | |
| | GSPAIKKGILQTLKIVDELVKVMGRHAPENIVIEMARENQTTQKGQKNSRER | |
| | MKRIEEGIKELGSQILKEHPVENTQLQNEKLYLYYLQNGRDMYVDQELDINR | |
| | LSDYDVDHIVPQSFLKDDSIDNKVLTRSDKARGKSDNVPSEEVVKKMKNYWR | |
| | QLLNAKLITQRKFDNLTKAERGGLSELDKAGFIKRQLVETRQITKHVAQILD | |
| | SRFNTKYDENDKLIRDVKIITLKSKLVSDFRKDFQLYKVREINNYHHAHDAY | |
| | LNAVVGTALIKKYPKLESEFVYGDYKVYDVRKMIAKSEQEIGKATAKYFFYS | |
| | NIMNFFKTEITLANGEIRKRPLIETNGETGEIVWDKGKDFATVKKVLSMPQV | |
| | NIVKKTEVQTGGFSKESILPKRNSDKLIARKKDWDTKKYGGFDSPTVAYSVL | |
| | VVAKVEKGKSKKLKTVKELVGITIMERSSFEKNPVDFLEAKGYKNIKKDLII | |
| | KLPKYSLFELENGRKRLLASAGELQKGNELALPNKYVTLLYLASHYEKLKGS | |
| | PEDNEQKQLFVEQHKDYFDEIIEQISEFSKRVILADANLEKIKSLYEKNRDK | |
| | PIEEQAENFIHLFTFTNLGAPAAFKFFDTTIDRKRYTSTKEVLNATLIHQSI | |
| | TGLYETRIDLSQLGGD | |
| CasEnd-85 | MKKKYSIGLDIGTNSVGWAVITDEYKVPSKKFKVLGNTDRQSIKKNLLGALL | 45 |
| | FDSGETAEATRLKRTARRRYTRRKNRIRYLQEIFAEEMAKVDDSFFHRLEES | |
| | FLVEEDKKHERHPIFGNIVDEVAYHEKYPTIYHLRKKLADSTEKADLRLIYL | |
| | ALAHMIKFRGHFLIEGDLNSENSDVDKLFIQLVQTYNQLFEENPINESGVDA | |
| | KAILSAKLSKSRRLENLIAQLPGEKKNGLFGNLIALSLGLTPNFKSNFDLAE | |
| | DAKLQLSKDTYDDDLDNLLAQIGDQYADLFLAAKNLSDAILLSDILTVNSEI | |
| | TKAPLSASMIKRYDEHHQDLTLLKALVRQQLPEKYKEIFFDKSKNGYAGYID | |
| | GGASQEEFYKFIKPILEKMDGTEELLAKLNREDFLRKQRTFDNGSIPHQIHL | |
| | GELHAILRRQEEFYPFLKENREKIEKILTFRIPYYVGPLARGNSRFAWMTRK | |
| | SEETITPWNFEEVVDKGASAQSFIERMTNFDKNLPNEKVLPKHSLLYEYFTV | |
| | YNELTKVKYVTEGMRKPEFLSGEQKQAIVDLLFKKNRKVTVKQLKEDYFKKI | |
| | ECFDSVEISGVEDRFNASLGTYHDLLKIIKDKEFLDNEENEDILEDIVLTLT | |
| | LFEDKEMIEERLKKYANLFDDKVMKQLKRRRYTGWGRLSKKLINGIRDKQSG | |
| | KTILDFLKSDGFANRNFMQLIHDDSLTFKEEIQKAQVSGQGDSLHEQIANLA | |
| | GSPAIKKGILQTVKIVDELVKVMGRHKPENIVIEMARENQTTQKGQKNSRER | |
| | MKRLEEGIKELGSQILKEHPVENTQLQNDKLYLYYLQNGKDMYTGQELDIDR | |
| | LSDYDVDHIIPQSFIKDDSIDNKVLTSSKKARGKSDNVPSEEVVKKMKNYWR | |
| | QLLKAKLISQRKFDNLTKAERGGLSELDKAGFIKRQLVETRQITKHVAQILD | |
| | SRMNTKYDENDKLIRDVKIITLKSKLVSDFRKDFQFYKVREINDYHHAHDAY | |
| | LNAVVGTALIKKYPKLESEFVYGDYKVYDVRKMIAKSEQEIGKATAKRFFYS | |
| | NIMNFFKSEITLANGEIRKRPLIETNEETGEIVWDKGKDFATVRKVLSMPQV | |
| | NIVKKTEVQTGGFSKESILPKRNSDKLIARKKDWDPKKYGGFDSPTVAYSVL | |
| | VVAKVEKGKKKKLKTVKELVGITIMERSSFEKNPIAFLEAKGYKNVQKDLII | |
| | KLPKYSLFELENGRKRLLASAGELQKGNELALPSKYVTFLYLASHYEKLKGS | |
| | PEDNEQKQLFVEQHNHYLDEIVDQISEFSKRYILADANLDKILSLYNNFRDK | |
| | PINEQAENFINLFTLTALGAPAAFKFFNTTIDRKRYTSTKEILNATLIHQSI | |
| | TGLYETRIDLSQLGGD | |
| CasEnd-86 | MKKKYSIGLDIGTNSVGWAVITDEYKVPSKKFKVLGNTDRQSIKKNLLGALL | 46 |
| | FDSGETAEATRLKRTARRRYTRRKNRIRYLQEIFASEMSKIDDSFFHRLEES | |
| | FLVEEDKKHERHPIFGNIVDEVAYHEKYPTIYHLRKKLADSTEKADLRLIYL | |
| | ALAHIIKFRGHFLIEGDLNSDNTDVQKLFIQLVQTYNQLFEENPLDESGVDA | |
| | KAILTEKLSKSRRLENLIAQLPGEKKNGLFGNLIALSLGLTPNFKSNFELAE | |
| | DAKLQLSKDTYDEDLENLLAQIGDQYADLFVAAKNLSDAILLSDILTVNDEI | |
| | TKAPLSASMIKRYDEHHQDLTLLKALVRQQLPEKYKEIFFDESKNGYAGYID | |
| | GGASQEEFYKFIKPILEKLDGTEELLAKLNREDLLRKQRTFDNGSIPHQIHL | |
| | GELHAILRRQEDFYPFLKENREKIEKILTFRIPYYVGPLARGNSRFAWMTRK | |
| | SEETITPWNFEEVVDKEASAQAFIERMTNFDKNLPEEKVLPKHSLLYEYFTV | |
| | YNELTKVKYVTEGMGKPEFLSGEQKKEIVDLLFKKNRKVTVKQLKEDLFKEF | |
| | ECFDSVEISGVEDRFNASLGTYHDLLKIIKDKDFLDNEENEDILEDIILTLT | |
| | LFEDREMIEERLKKYADLFDDKVLKQLKRRRYTGWGRLSKKLINGIRDKQSG | |
| | KTILDFLKSDGFANRNFMQLIHDDSLTFKEEIKKAQVIGQTDSLHEQIANLA | |
| | GSPAIKKGILQTVKIVDELVKVMGRHKPENIVIEMARENQTTQKGQKNSRER | |
| | LKRIEEGIKELGSQILKEHPVENTQLQNEKLYLYYLQNGKDMYTGKELDIDR | |
| | LSDYDVDHIIPQSFIKDDSIDNKVLTRSEKARGKSDNVPSEEVVKKMKSYWQ | |
| | KLLNAKLISQRKFDNLTKAERGGLSELDKAGFIKRQLVETRQITKHVAQILD | |
| | SRFNTKRDENDKLIREVKIITLKSKLVSDFRKDFGFYKVREINDYHHAHDAY | |
| | LNAVVGTALIKKYPKLESEFVYGDYKVYDSRKMIAKSEQEIGKATAKRFFYS | |
| | NIMNFFKTEIKLADGEIIKRPLIETNEETGEIVWDKEKDFATVRKVLSMPQV | |
| | NIVKKTEVQTGGFSKESILPKRNSDKLIARKKDWDTKKYGGFDSPTVAYSVL | |
| | VVAKVEKGKAKKLKTVKELVGITIMERSSFEKNPVAFLEAKGYQNIQKDLII | |
| | KLPKYSLFELENGRKRLLASAGELQKGNELALPQKYVTFLYLASHYEKKKGS | |
| | PEDEEQKQLYVEQHKYYFDEIIDQISEFSKRYILADKNLDKVEELYNKNRDK | |
| | SIVELAESFINLFTFTALGAPAAFKFFDTTIDRKRYTSTKEILNSTLIHQSI | |
| | TGLYETRIDLSKLGGD | |
| CasEnd-87 | MDKKYSIGLDIGTNSVGWAVITDEYKVPSKKFKVLGNTDRHSIKKNLIGALL | 47 |
| | FDSGETAEATRLKRTARRRYTRRKNRICYLQEIFSNEMAKVDDSFFHRLEES | |
| | FLVEEDKKHERHPIFGNIVDEVAYHEKYPTIYHLRKELADSTEKADLRLIYL | |
| | ALAHMIKFRGHFLIEGDLNSENTDVQKLFIQLVQTYNQLFEENPINEETVDA | |
| | KAILSAKLSKSRRLENLIAQFPGEKRNGLFGNLIALSLGLTPNFKSNEDLAE | |
| | DAKLQLSKDTYDEDLENLLGQIGDQYADLFLAAKNLSDAILLSDILTVNDEI | |
| | TKAPLSASMIKRYDEHHQDLTLLKALVRQQLPEKYKEIFFDESKNGYAGYID | |
| | GGASQEEFYKFIKPILEKMDGTEEFLAKINREDFLRKQRTFDNGSIPHQIHL | |
| | GELHAILRRQEDFYPFLKENREKIEKILTFRIPYYVGPLARGNSRFAWMTRK | |
| | SDETITPWNFEEVVDKEASAQAFIERMTNFDKNLPNEKVLPKHSLLYEKFTV | |
| | YNELTKVKYVTEGMGKPEFLSGEQKQEIVDLLFKKNRKVTVKQLKEFYFKEI | |
| | ECFDSVEISGVEDRFNASLGTYHDLLKIIKDKDELDNEENEDILEDIVLTLT | |
| | LFEDREMIEKRLKKYANLFDKKVLKKLKRRRYTGWGRLSRKLINGIRDKQSG | |
| | KTILDFLKSDGFANRNFMQLIHDDSLTFKEEIKKAQVSGQGDSLHEHIANLA | |
| | GSPAIKKGILQTVKVVDELVKVMGRHKPENIVIEMARENQTTQKGQKNSRER | |
| | MKRLEEGLKELGSQILKEHPVENTQLQNDKLYLYYLQNGKDMYTGEELDIDR | |
| | LSDYDVDHIIPQSFIKDDSIDNKVLTSSEKARGKSDNVPSEEVVKKMKSYWR | |
| | QLLNAKLISQRKFDNLTKAERGGLSELDKAGFIKRQLVETRQITKHVAQILD | |
| | SRMNTKYDENDKLIREVKVITLKSKLVSDFRKDFQFYKVREINNYHHAHDAY | |
| | LNAVVGTALIKKYPKLESEFVYGDYKVYDVRKMIAKSEQEIGKATAKYFFYS | |
| | NIMNFFKTEITLANGEIRKRPLIETNGETGEIVWDKGRDFATVRKVLSMPQV | |
| | NIVKKTEVQTGGFSKESILPKRDSDKLIARKKDWDTKKYGGFDSPTVAYSVL | |
| | VVAKVEKGKAKKLKTVKELVGITIMERSSFEKDPVAFLEAKGYKEIQKDLII | |
| | KLPKYSLFELENGRKRLLASAGELQKGNELALPQKYVTFLYLASHYEKLKGS | |
| | PEDNEKKQLYVEQHKHYFDEILDQISEFSKRYILADKNLEKILSLYNKNRDK | |
| | PISEQAESIINLFTLTALGAPAAFKFFGTTIDRKRYTSTKEILDATLIHQSI | |
| | TGLYETRIDLSQLGGD | |
| CasEnd-88 | MDKKYSIGLDIGTNSVGWAVITDEYKVPSKKFKVLGNTDRHSIKKNLIGALL | 48 |
| | FDSGETAEATRLKRTARRRYTRRKNRICYLQEIFSNEMAKVDDSFFHRLEES | |
| | FLVEEDKKHERHPIFGNIVDEVAYHEKYPTIYHLRKKLADSTEKADLRLIYL | |
| | ALAHMIKFRGHFLIEGDLNSDNSDVQKLFIQLVQTYNQLFEENPINESGVDA | |
| | KAILSARLSKSRRLENLIAQFPGEKKNGLFGNLIALSLGLTPNFKSNFDLAE | |
| | DAKLQLSKDTYDEDLENLLAQIGDQYADLFLAAKNLSDAILLSDILTVNSEI | |
| | TKAPLSASMVKRYDEHHQDLTLLKQLVRQQLPEKYKEIFFDQSKNGYAGYID | |
| | GGASQEEFYKYIKPILEKMDGSEEFLDKIEREDFLRKQRTFDNGSIPHQIHL | |
| | GELHAILRRQEKYYPFLKDNREKIEKILTFRIPYYVGPLARGNSRFAWMTRK | |
| | SDETITPWNFEEVVDKGASAQSFIERMTNFDKNLPNEKVLPKHSLLYEKFTV | |
| | YNELTKVKYVTEGMRKPEFLSAEQKQEIVDLLFKKNRKVTVKQLKEDYFKKI | |
| | ECFDSVEISGVEDRFNASLGTYHDLLKIIKDKDFLDNEENEKILEDIVLTLT | |
| | LFEDREMIEERLKKYAHLFDDKVLKQLKRRRYTGWGRLSRKLINGIRDKQSG | |
| | KTILDFLKSDGFANRNFMQLIHDDSLTFKEEIEKAQVSGQGDSLHEHIANLA | |
| | GSPAIKKGILQTVKVVDELVKVMGRHKPENIVIEMARENQTTQKGQKNSRER | |
| | MKRIEEGIKELGSQILKEHPVENTQLQNEKLYLYYLQNGRDMYVDQELDINR | |
| | LSDYDVDHIVPQSFLKDDSIDNKVLTRSDKARGKSDNVPSEEVVKKMKNYWR | |
| | QLLNAKLITQRKFDNLTKAERGGLSELDKAGFIKRQLVETRQITKHVAQILD | |
| | SRMNTKYDENDKLIREVKVITLKSKLVSDFRKDFQFYKVREINNYHHAHDAY | |
| | LNAVVGTALIKKYPKLESEFVYGDYKVYDVRKMIAKSEQEIGKATAKYFFYS | |
| | NIMNFFKTEITLANGEIRKRPLIETNGETGEIVWDKGRDFATVRKVLSMPQV | |
| | NIVKKTEVQTGGFSKESILPKRDSDKLIARKKDWDTKKYGGFDSPTVAYSVL | |
| | VVAKVEKGKTKKLKTVKELVGITIMERSAFEKNPVDFLEAKGYKEIKKDLII | |
| | KLPKYSLFELENGRKRMLASAGELQKGNELALPQKYVTLLYLASHYEKLKGS | |
| | PEDNEQKQLFVEQHKHYFDEIIEQISEFSKRYILADANLEKILSLYEKHRDK | |
| | PIEELAENFIHLFTLTALGAPAAFKFFDTTIDRKRYTSTKEILDATLIHQSI | |
| | TGLYETRIDLSQLGGD | |
| CasEnd-89 | MKKKYSIGLDIGTNSVGWAVITDDYKVPSKKFKVLGNTDRKSIKKNLIGALL | 49 |
| | FDSGETAEATRLKRTARRRYTRRKNRIRYLQEIFAEEMAKVDDSFFHRLEES | |
| | FLVEEDKKHERHPIFGNIVDEVAYHEKYPTIYHLRKKLVDSTEKADLRLIYL | |
| | ALAHMIKFRGHFLIEGDLNSENSDVDKLFIQLVQTYNQLFEENPINESGVDA | |
| | KAILSAKLSKSRRLENLIAQFPGEKKNGLFGNLIALSLGLTPNFKKNFDLAE | |
| | DAKLQLSKDTYDDDLDNLLAQIGDQYADLFLAAKNLSDAILLSDILRVNTEI | |
| | TKAPLSASMIKRYDEHHQDLTLLKALVRQQLPEKYKEIFFDKSKNGYAGYID | |
| | GGASQEEFYKFIKPILEKMDGTEELLAKLNREDLLRKQRTFDNGSIPHQIHL | |
| | GELHAILRRQEDFYPFLKENREKIEKILTFRIPYYVGPLARGNSRFAWMTRK | |
| | SEETITPWNFEEVVDKGASAQSFIERMINEDENLPEEKVLPKHSLLYEYFTV | |
| | YNELTKVKYVTEGMRKPEFLSGEQKKEIVDLLFKKNRKVTVKQLKEDYFKEI | |
| | ECFDSVEISGVEDRFNASLGTYHDLLKIIKDKDFLDNEENEDILEDIVLTLT | |
| | LFEDREMIEKRLKKYADLFDKKVMKQLKRRRYTGWGRLSRKLINGIRDKQSG | |
| | KTILDFLKSDGFANRNFMQLIHDDSLTFKEEIKKAQVKGQGDSLHEQIANLA | |
| | GSPAIKKGILQTVKVVDELVKVMGRHKPENIVIEMARENQTTQKGQKNSRER | |
| | MKRIEEGIKELGSQILKEHPVENTQLQNEKLYLYYLQNGRDMYTGDELDINR | |
| | LSQYDVDHIVPQSFLKDDSIDNKVLTRSDEARGKSDNVPSEEVVKKMKNYWR | |
| | QLLKAGLITQRKFDNLTKAERGGLSELDKAGFIKRQLVETRQITKHVAQILD | |
| | SRMNTKRDENDKLIRDVKVITLKSKLVSDFRKDFQFYKVREINNYHHAHDAY | |
| | LNAVVGTALIKKYPKLESEFVYGDYKKYDVRKMIAKSEQEIGKATAKYFFYS | |
| | NIMNFFKTEITLANGEIRKRPLIETNEETGEIVWDKERDFATVRKVLSMPQV | |
| | NIVKKTEVQTGGFSKESILPKRNSDKLIARKKGWDPKKYGGFDSPTVAYSVL | |
| | VVAKVEKGKSKKLKTVKELLGITIMERSSFEKDPVAFLEAKGYKEVKKDLII | |
| | KLPKYSLFELENGRKRMLASAGELQKGNELALPSKYVNFLYLASHYEKLKGK | |
| | PEDNEQKQEYVEQHKHYLDEIIEQISEFSERVILADKNLSKVLSAYNEHRDK | |
| | PISEQAENIIHLFTLTNLGAPAAFKYFDTTIDRKRYTSTKEVLDATLIHQSI | |
| | TGLYETRIDLSQLGGD | |
| CasEnd-90 | MKKKYSIGLDIGTNSVGWAVITDEYKVPSKKFKVLGNTDRHSIKKNLIGALL | 50 |
| | FDSGETAEATRLKRTARRRYTRRKNRIRYLQEIFAEEMAKVDDSFFQRLEES | |
| | FLVEEDKKNERHPIFGNIVDEVAYHENYPTIYHLRKKLADSTEKADLRLIYL | |
| | ALAHIIKFRGHFLIEGDLNSENSDVQKLFEQLVQTYNQLFEEDPLNEEGIDA | |
| | EAILSAKLSKSRRLENLIAQIPGEKKNGLFGNLIALSLGLTPNFKANFDLAE | |
| | DAKLQLSKDTYDDDLENLLAQIGDQYADLFLAAKNLSDAILLSDILTVNGEI | |
| | TKAPLSASMIKRYDEHHQDLTLLKALVRKQLPEKYKEIFFDESKNGYAGYID | |
| | GGASQEEFYKYIKPILEKMDGAEEFLAKINREDFLRKQRTFDNGSIPHQIHL | |
| | GELHAILRRQEKFYPFLKENQEKIEKILTFRIPYYVGPLARGNSRFAWMTRK | |
| | SDETITPWNFEEVVDKEASAQAFIERMTNFDKNLPEEKVLPKHSLLYEYFTV | |
| | YNELTKVKYVTEGMGKPEFLSSEQKKEIVDLLFKKNRKVTVKQLKEDYFKKI | |
| | ECFDTVEISGVEDRFNASLGTYHDLLKIIKDKEFLDNEENEDILEDIVLTLT | |
| | LFEDKEMIEERLKKYADLFDKKVLKKLKRRRYTGWGRLSKKLINGIRDKQSG | |
| | KTILDFLKSDGFANRNFMQLIHDDSLTFKEEIKKAQVIGQKDSLHEQIANLA | |
| | GSPAIKKGILQTVKIVDELVKVMGRHAPENIVIEMARENQTTQKGQKNSRER | |
| | MKRLEEGVKELGSKILKEHPVENTQLQNDKLYLYYLQNGKDMYTGEELDIDR | |
| | LSDYDVDHIIPQSFIKDDSIDNKVLTSSAKARGKSDDVPSEEVVKKMKNYWR | |
| | KLLKAKLISQRKFDNLTKAERGGLSELDKAGFIKRQLVETRQITKHVAQILD | |
| | SRFNTERDENDKLIRDVKIITLKSKLVSDFRKDFQLYKVREINDYHHAHDAY | |
| | LNAVVGTALIKKYPKLESEFVYGDYKVYDSYKMIGKSDQEIGKATAKRFFYS | |
| | NIMNFFKTEITLANGEIRERPVIETNEETGEIVWDKEKDFATVRKVLSMPQV | |
| | NIVKKTEVQTGGFSKESILPKRNSDKLIARKKDWDTKKYGGFDSPTVAYSVL | |
| | VVAKVEKGKAKKLKTVKELVGITIMERSSFEKNPVAFLENKGYKDIQEDLII | |
| | KLPKYSLFELENGRKRLLASAGELQKGNELALPAKYVTFLYLASHYEKLKGS | |
| | PEDEEKKRLYVEQHEHYFDEIIDQIIEFSKRYILADKNLEKILSLYNENRDK | |
| | SISEQAESFINLFTLTALGAPAAFKFFDTTIDRKRYTSTKEILNATLIHQSI | |
| | TGLYETRIDLSKLGGD | |
| CasEnd-91 | MDKKYSIGLDIGTNSVGWAVITDEYKVPSKKFKVLGNTDRQSIKKNLIGALL | 51 |
| | FDSGETAEATRLKRTARRRYTRRKNRIRYLQEIFAEEMAKVDDSFFHRLEES | |
| | FLVEEDKKHERHPIFGNIVDEVAYHEKYPTIYHLRKELADSTEKADLRLIYL | |
| | ALAHMIKFRGHFLIEGDLNPDNSDVDKLFIQLVQTYNQLFEENPINESGVDA | |
| | KAILSAKLSKSRRLENLIAQLPGEKKNGLFGNLIALSLGLTPNFKSNFDLAE | |
| | DAKLQLSKDTYDEDLDNLLAQIGDQYADLFLAAKNLSDAILLSDILTVNSEI | |
| | TKAPLSASMIKRYDEHHQDLTLLKALVRQQLPEKYKEIFFDQSKNGYAGYID | |
| | GGASQEEFYKFIKPILEKMDGTEELLAKLNREDFLRKQRTFDNGSIPHQIHL | |
| | GELHAILRRQEDFYPFLKENREKIEKILTFRIPYYVGPLARGNSRFAWMTRK | |
| | SEETITPWNFEEVVDKEASAQAFIERMTNFDKNLPNEKVLPKHSLLYEYFTV | |
| | YNELTKVKYVTEGMKKPEFLSGEQKKEIVDLLFKKNRKVTVKQLKEDYFKKI | |
| | ECFDSVEISGVEDRFNASLGTYHDLLKIIKDKDFLDNEENEDILEDIVLTLT | |
| | LFEDKEMIEERLKKYAHLFDDKVMKQLKRRRYTGWGRLSRKLINGIRDKQSG | |
| | KTILDFLKSDGFANRNFMQLIHDDSLTFKEEIQKAQVKGQGDSLHEQIANLA | |
| | GSPAIKKGILQTVKIVDELVKVMGRHKPENIVIEMARENQTTQKGQKNSRER | |
| | MKRLEEGIKELGSQILKEHPVENTQLQNEKLYLYYLQNGKDMYTGQELDIDR | |
| | LSDYDVDHIIPQSFIKDDSIDNKVLTSSDKARGKSDNVPSEEVVKKMKSYWR | |
| | QLLNAKLISQRKFDNLTKAERGGLSELDKAGFIKRQLVETRQITKHVAQILD | |
| | SRMNTEYDENDKLIRDVKIITLKSKLVSDFRKDFQFYKVREINNYHHAHDAY | |
| | LNAVVGTALIKKYPKLESEFVYGDYKVYDVRKMIAKSEQEIGKATAKRFFYS | |
| | NIMNFFKTEITLANGEIRKRPLIETNEETGEIVWDKGKDFATVRKVLSMPQV | |
| | NIVKKTEVQTGGFSKESILPKRNSDKLIARKKDWDPKKYGGFDSPTVAYSVL | |
| | VVAKVEKGKAKKLKTVKELVGITIMERSSFEKDPVAFLEAKGYKEIRKDLII | |
| | KLPKYSLFELENGRKRMLASAGELQKGNELALPSKYVTFLYLASHYEKLKGS | |
| | PEDNEQKQLFVEQHKHYLDEIIEQISEFSKRYILADKNLEKILSLYNNNEDK | |
| | SISEQAENIINLFTLTNLGAPAAFKFFDTTIDRKRYTSTKEILDATLIHQSI | |
| | TGLYETRIDLSQLGGD | |
| CasEnd-92 | MKKKYSIGLDIGTNSVGWAVITDDYKVPSKKFKVLGNTDRQSIKKNLIGALL | 52 |
| | FDSGETAEATRLKRTARRRYTRRKNRIRYLQEIFANEMAKVDDSFFHRLEES | |
| | FLVEEDKKHERHPIFGNIVDEVAYHEKYPTIYHLRKKLVDSTEKADLRLIYL | |
| | ALAHMIKFRGHFLIEGDLNSDNSDVDKLFIQLVQTYNQLFEENPINEEGVDA | |
| | KAILSAKLSKSRRLENLIAQLPGEKKNGLFGNLIALSLGLTPNFKSNEDLAE | |
| | DAKLQLSKDTYDDDLENLLAQIGDQYADLFLAAKNLSDAILLSDILRVNTEI | |
| | TKAPLSASMIKRYDEHHQDLTLLKALVRKQLPEKYKEIFFDESKNGYAGYID | |
| | GGASQEEFYKFIKPILEKMDGTEELLAKLNREDLLRKQRTFDNGSIPHQIHL | |
| | GELHAILRRQEEFYPFLKENREKIEKILTFRIPYYVGPLARGNSRFAWMTRK | |
| | SEETITPWNFEEVVDKGASAQSFIERMTNFDENLPNEKVLPKHSLLYEYFTV | |
| | YNELTKVKYVTEGMGKPEFLSGEQKKEIVDLLFKKNRKVTVKQLKEDYFKKI | |
| | ECFDSVEISGVEDRFNASLGTYHDLLKIIKDKDFLDNEENEDILEDIVLTLT | |
| | LFEDREMIEERLKKYANLFDKKVMKQLKRRRYTGWGRLSRKLINGIRDKQSG | |
| | KTILDFLKSDGFANRNFMQLIHDDSLTFKEEIKKAQVKGQGESLHEQIADLA | |
| | GSPAIKKGILQTVKVVDELVKVMGRHKPENIVIEMARENQTTQKGQKNSRER | |
| | MKRIEEGIKELGSQILKEHPVENTQLQNEKLYLYYLQNGRDMYTGQELDINR | |
| | LSDYDVDHIVPQSFLKDDSIDNKVLTRSEKARGKSDNVPSEEVVKKMKNYWR | |
| | QLLNAKLITQRKFDNLTKAERGGLSELDKAGFIKRQLVETRQITKHVAQILD | |
| | SRMNTKYDENDKLIRDVKVITLKSKLVSDFRKDFQFYKVREINNYHHAHDAY | |
| | LNAVVGTALIKKYPKLESEFVYGDYKKYDVRKMIAKSEQEIGKATAKYFFYS | |
| | NIMNFFKSEIKLANGEIRKRPLIETNEETGEIVWDKERDFATVRKVLSMPQV | |
| | NIVKKTEVQTGGFSKESILPKRKSDKLIARKKGWDPKKYGGFDSPTVAYSVL | |
| | VVAKVEKGKAKKLKTVKELLGITIMERSSFEKDPVAFLEAKGYKEVKKDLII | |
| | KLPKYSLFELENGRKRMLASAGELQKGNELALPSKYVNFLYLASHYEKLKGK | |
| | PEDNEKKQLYVEQHKHYLDEIIEQISEFSERVILADKNLDKVLSAYNNIRDK | |
| | SIKEQAENIIHLFTLTNLGAPAAFKYFGTTIDRKRYTSTKEVLNATLIHQSI | |
| | TGLYETRIDLSQLGGD | |
| CasEnd-93 | MDKKYSIGLDIGTNSVGWAVITDEYKVPSKKFKVLGNTDRHSIKKNLIGALL | 53 |
| | FDSGETAEATRLKRTARRRYTRRKNRICYLQEIFSNEMAKVDDSFFHRLEES | |
| | FLVEEDKKHERHPIFGNIVDEVAYHEKYPTIYHLRKKLADSTEKADLRLIYL | |
| | ALAHMIKFRGHFLIEGDLNPDNSDVDKLFIQLVQTYNQLFEENPINEEGVDA | |
| | KAILSAKLSKSRRLENLIAQFPGEKRNGLFGNLIALSLGLTPNFKSNEDLAE | |
| | DAKLQLSKDTYDEDLDNLLAQIGDQYADLFLAAKNLSDAILLSDILTVNSEI | |
| | TKAPLSASMIKRYDEHHQDLTLLKALVRQQLPEKYKEIFFDESKNGYAGYID | |
| | GGASQEEFYKFIKPILEKMDGTEELLAKLNREDFLRKQRTFDNGSIPHQIHL | |
| | GELHAILRRQEEFYPFLKENREKIEKILTFRIPYYVGPLARGNSRFAWMTRK | |
| | SDETITPWNFEEVVDKGASAQAFIERMTNFDKNLPTEKVLPKHSLLYEYFTV | |
| | YNELTKVKYVTEGMRKPEFLSGEQKQEIVDLLFKKNRKVTVKQLKEDYFKKI | |
| | ECFDSVEISGVEDRFNASLGTYHDLLKIIKDKDFLDNEENEDILEDIVLTLT | |
| | LFEDREMIEERLKKYANLFDKKVLKKLKRRRYTGWGRLSKKLINGIRDKQSG | |
| | KTILDFLKSDGFANRNFMQLIHDDSLTFKEEIKKAQVSGQGDSLHEHIANLA | |
| | GSPAIKKGILQTVKVVDELVKVMGRHKPENIVIEMARENQTTQKGQKNSRER | |
| | MKRIEEGIKELGSQILKEHPVENTQLQNEKLYLYYLQNGRDMYVDQELDINR | |
| | LSDYDVDHIVPQSFLKDDSIDNKVLTRSDKARGKSDNVPSEEVVKKMKNYWR | |
| | QLLNAKLITQRKFDNLTKAERGGLSELDKAGFIKRQLVETRQITKHVAQILD | |
| | SRMNTKYDENDKLIREVKVITLKSKLVSDFRKDFQFYKVREINNYHHAHDAY | |
| | LNAVVGTALIKKYPKLESEFVYGDYKVYDVRKMIAKSEQEIGKATAKYFFYS | |
| | NIMNFFKTEITLANGEIRKRPLIETNGETGEIVWDKGRDFATVRKVLSMPQV | |
| | NIVKKTEVQTGGFSKESILPKRDSDKLIARKKDWDTKKYGGFDSPTVAYSVL | |
| | VVAKVEKGKTKKLKTVKELVGITIMERSSFEKDPVAFLEAKGYKEVQEDLII | |
| | KLPKYSLFELENGRKRMLASAGELQKGNELALPNKYVTFLYLASHYEKLKGK | |
| | PEDEEQKQLYVEQHLDYFDEILDQISEFSKRYILADKNLEKILSLYNEFEDY | |
| | SISEQAESFINLFTFTALGAPAAFKFFGTTIDRKRYTSTKEILDSTLIHQSI | |
| | TGLYETRIDLSQLGGD | |
| CasEnd-94 | MDKKYSIGLDIGTNSVGWAVITDEYKVPSKKFKVLGNTDRHSIKKNLIGALL | 54 |
| | FDSGETAEATRLKRTARRRYTRRKNRICYLQEIFSNEMAKVDDSFFHRLEES | |
| | FLVEEDKKHERHPIFGNIVDEVAYHEEYPTIYHLRKKLADSTEKADLRLIYL | |
| | ALAHIIKFRGHFLIEGDLNSENSDVQKLFIQLVQTYNQLFEENPINEEGVDA | |
| | KAILSAKLSKSRRLENLIAQFPGEKKNGLFGNLIALSLGLTPNFKSNFGLSE | |
| | DAKLQLSKDTYDEDLENLLGQIGDQYADLFLAAKNLSDAILLSDILTVNDEI | |
| | TKAPLSASMIKRYDEHHQDLTLLKTFVRQQLPEKYKEIFFDPSKNGYAGYID | |
| | GGASQEEFYKYIKPILEKLDGTEELLAKINREDFLRKQRTFDNGSIPHQIHL | |
| | GELHAILRRQEEYYPFLKENREKIEKILTFRIPYYVGPLARGNSRFAWMTRK | |
| | SDETITPWNFEEVVDKGASAQAFIERMTNFDKNLPTEKVLPKHSLLYEYFTV | |
| | YNELTKVKYVTEGMGKPEFFSGNQKQEIVDGLFKKDRKVTVKQLKEFLFKEF | |
| | DEFRSVEISGVEDAFNASLGTYHDLLKIIKDKDFLDNEENEDILEDIVLTLT | |
| | LFEDKEMIEERLKKYADLFDDKVLKQLKRRRYTGWGRLSRKLINGIRDKQSG | |
| | KTILDFLKSDGFANRNFMQLIHDDSLTFKEEIKKAQVSGQGDSLHEHIANLA | |
| | GSPAIKKGILQTVKVVDELVKVMGRHKPENIVIEMARENQTTQKGQKNSRER | |
| | MKRIEEGIKELGSQILKEHPVENTQLQNEKLYLYYLQNGRDMYVDQELDINR | |
| | LSDYDVDHIVPQSFLKDDSIDNKVLTRSDKARGKSDNVPSEEVVKKMKNYWR | |
| | QLLNAKLITQRKFDNLTKAERGGLSELDKAGFIKRQLVETRQITKHVAQILD | |
| | SRMNTKYDENDKLIREVKVITLKSKLVSDFRKDFQFYKVREINNYHHAHDAY | |
| | LNAVVGTALIKKYPKLESEFVYGDYKVYDVRKMIAKSEQEIGKATAKYFFYS | |
| | NIMNFFKTEITLANGEIRKRPLIETNGETGEIVWDKGRDFATVRKVLSMPQV | |
| | NIVKKTEVQTGGFSKESILPKRNSDKLIARKKDWDPKKYGGFDSPTVAYSVL | |
| | VVAKVEKGKSKKLKSVKELLGITIMERSSFEKNPIDFLEAKGYKEVKKDLII | |
| | KLPKYSLFELENGRKRMLASAGELQKGNELALPSKYVNFLYLASHYEKLKGS | |
| | PEDNEQKQLFVEQHKHYLDEIIEQISEFSKRVILADANLDKVLSAYNKHRDK | |
| | PIREQAENIIHLFTLTNLGAPAAFKYFDTTIDRKRYTSTKEVLDATLIHQSI | |
| | TGLYETRIDLSQLGGD | |
| CasEnd-95 | MDKKYSIGLDIGTNSVGWAVITDEYKVPSKKFKVLGNTDRHSIKKNLIGALL | 55 |
| | FDSGETAEATRLKRTARRRYTRRKNRICYLQEIFSNEMAKVDDSFFHRLEES | |
| | FLVEEDKKHERHPIFGNIVDEVAYHEKYPTIYHLRKKLADSTEKADLRLIYL | |
| | ALAHIIKFRGHFLIEGDLNSENSDVDKLFIQLVQTYNQLFEENPINEEGVDA | |
| | KAILSARLSKSRRLENLIAQFPGEKKNGLFGNLIALSLGLTPNFKSNEDLSE | |
| | DAKLQLSKDTYDDDLDNLLAQIGDQYADLFLAAKNLSDAILLSDILTVNSEI | |
| | TKAPLSASMIKRYDEHHQDLTLLKALVRQQLPEKYKEIFFDKSKNGYAGYID | |
| | GGASQEEFYKFIKPILEKMDGTEELLAKINREDFLRKQRTFDNGSIPHQIHL | |
| | GELHAILRRQEEFYPFLKENREKIEKILTFRIPYYVGPLARGNSRFAWMTRK | |
| | SEETITPWNFEEVVDKEASAQAFIERMTNFDKNLPNEKVLPKHSLLYEYFTV | |
| | YNELTKVKYVTEGMRKPEFLSAEQKQEIVDLLFKKNRKVTVKQLKEDYFKKI | |
| | ECFDSVEISGVEDRFNASLGTYHDLLKIIKDKDFLDNEENEDILEDIVLTLT | |
| | LFEDKEMIEKRLSKYANLFDKKVLKQLKRRRYTGWGRLSRKLINGIRDKQSG | |
| | KTILDFLKSDGFANRNFMQLIHDDSLTFKEAIKKAQVKGQGDSLHEHIANLA | |
| | GSPAIKKGILQTVKVVDELVKVMGRHKPENIVIEMARENQTTQKGQKNSRER | |
| | MKRIEEGLKELGSQILKEHPVENTQLQNEKLYLYYLQNGKDMYTGQELDIDR | |
| | LSDYDVDHIIPQSFIKDDSIDNKVLTSSEKARGKSDNVPSEEVVKKMKNYWR | |
| | QLLKAKLISQRKFDNLTKAERGGLSELDKAGFIKRQLVETRQITKHVAQILD | |
| | SRMNTKYDENDKLIREVKVITLKSKLVSDFRKDFQFYKVREINNYHHAHDAY | |
| | LNAVVGTALIKKYPKLESEFVYGDYKVYDVRKMIAKSEQEIGKATAKYFFYS | |
| | NIMNFFKTEITLANGEIRKRPLIETNGETGEIVWDKGRDFATVRKVLSMPQV | |
| | NIVKKTEVQTGGFSKESILPKRNSDKLIARKKDWDPKKYGGFDSPTVAYSVL | |
| | VVAKVEKGKAKKLKTVKELVGITIMERSSFEKDPIAFLEAKGYKEIQKDLII | |
| | KLPKYSLFELENGRKRLLASAGELQKGNELALPSKYVTFLYLASHYEKLKGS | |
| | PEDNEKKQLYVEQHLHYFDEILDQISEFSERYILADKNLEKILELYNKNEDY | |
| | SISEQAESIINLFTLTALGAPAAFKFFGTTIDRKRYTSTKEILDSTLIHQSI | |
| | TGLYETRIDLSQLGGD | |
| CasEnd-96 | MKKKYSIGLDIGTNSVGWAVITDEYKVPSKKFKVLGNTDRHSIKKNLLGALL | 56 |
| | FDSGETAEATRLKRTARRRYTRRKNRIRYLQEIFASEMAKVDDSFFHRLEES | |
| | FLVEEDKKHERHPIFGNIVDEVAYHEKYPTIYHLRKKLADSTEKADLRLIYL | |
| | ALAHMIKFRGHFLIEGDLNPDNSDVDKLFIQLVQTYNQLFEENPINESGVDA | |
| | KAILSARLSKSRRLENLIAQLPGEKRNGLFGNLIALSLGLTPNFKSNEDLAE | |
| | DAKLQLSKDTYDEDLDNLLGQIGDQYADLFLAAKNLSDAILLSDILTVNSEI | |
| | TKAPLSASMIKRYDEHHQDLTLLKALVRQQLPEKYKEIFFDESKNGYAGYID | |
| | GGASQEEFYKFIKPILEKMDGTEELLAKLNREDFLRKQRTFDNGSIPHQIHL | |
| | GELHAILRRQEDFYPFLKENREKIEKILTFRIPYYVGPLARGNSRFAWMTRK | |
| | SEETITPWNFEEVVDKGASAQAFIERMTNFDKNLPTEKVLPKHSLLYEYFTV | |
| | YNELTKVKYVTEGMRKPEFLSGEQKKAIVDLLFKKNRKVTVKQLKEDYFKKI | |
| | ECFDSVEISGVEDRFNASLGTYHDLLKIIKDKDFLDNEENEDILEDIVLTLT | |
| | LFEDREMIEERLKKYANLFDKKVLKQLKRRRYTGWGRLSRKLINGIRDKQSG | |
| | KTILDFLKSDGFANRNFMQLIHDDSLTFKEIIKKAQVSGQGDSLHEQIANLA | |
| | GSPAIKKGILQTVKIVDELVKVMGRHKPENIVIEMARENQTTQKGQKNSRER | |
| | MKRIEEGIKELGSQILKEHPVENTQLQNEKLYLYYLQNGKDMYTGQELDIDR | |
| | LSDYDVDHIIPQSFIKDDSIDNKVLTRSDKARGKSDNVPSEEVVKKMKNYWR | |
| | QLLNAKLISQRKFDNLTKAERGGLSELDKAGFIKRQLVETRQITKHVAQILD | |
| | SRMNTKYDENDKLIRDVKIITLKSKLVSDFRKDFQFYKVREINNYHHAHDAY | |
| | LNAVVGTALIKKYPKLESEFVYGDYKVYDVRKMIAKSEQEIGKATAKRFFYS | |
| | NIMNFFKTEITLANGEIRKRPLIETNEETGEIVWDKEKDFATVRKVLSMPQV | |
| | NIVKKTEVQTGGFSKESILPKRNSDKLIARKKDWDPKKYGGFDSPTVAYSVL | |
| | VVAKVEKGKSKKLKTVKELVGITIMERSSFEKDPVAFLEAKGYKEVQKDLII | |
| | KLPKYSLFELENGRKRLLASAGELQKGNELALPSKYVTFLYLASHYEKLKGS | |
| | PEDNEKKQLFVEQHRHYLDEIIDQISEFSKRYILADKNLDKLLSLYNNHRDK | |
| | SISEQAENFINLFTLTNLGAPAAFKFFDTTIDRKRYTSTKEILDSTLIHQSI | |
| | TGLYETRIDLSQLGGD | |
| CasEnd-97 | MKKKYSIGLDIGTNSVGWAVITDEYKVPSKKFKVLGNTDRQSIKKNLLGALL | 57 |
| | FDSGETAEATRLKRTARRRYTRRKNRIRYLQEIFAEEMNKVDDSFFHRLEES | |
| | FLVEEDKKGERHPIFGNIVDEVAYHEKYPTIYHLRKKLADSTEKADLRLIYL | |
| | ALAHMIKFRGHFLIEGDLNPDNSDVDKLFIQLVQTYNQLFEESPINEEGVDA | |
| | KAILSAKLSKSRRLENLIAQIPGEKRNGLFGNLIALSLGLTPNFKSNEDLAE | |
| | DAKLQLSKDTYDEDLDNLLAQIGDQYADLFLAAKNLSDAILLSGILTVNDEN | |
| | TKAPLSASMIKRYDEHHQDLTLLKQLVRQQLPEKYKEIFFDDSKNGYAGYID | |
| | GGASQEDFYKYIKPILEKLDGAEELLAKLNREDFLRKQRTFDNGSIPHQIHL | |
| | GELHAILRRQEDFYPFLKENREKIEKILTFRIPYYVGPLARGNSRFAWMTRK | |
| | SDETITPWNFEEVVDKEASAQAFIERMTNFDKNLPSEKVLPKHSLLYEYFTV | |
| | YNELTKVKYITEGMGKPEFLSAEQKKEIVDLLFKKNRKVTVKQLKEDYFKKI | |
| | ECFDSVEISGVEDRFNASLGTYHDLLKIIKDKDFLDNEENEDILEDIVLTLT | |
| | LFEDKEMIEERLEKYAHLFDDKVLKQLKRRRYTGWGRLSKKLINGIRDKQSG | |
| | KTILDFLKSDGFANRNFMQLIHDDSLTFKEEIQKAQVIGQGDSLHEQIADLA | |
| | GSPAIKKGILQSIKIVDELVKVMGRHAPENIVIEMARENQTTQKGQKNSRER | |
| | MKRIEEGIKELGSQILKEHPVENTQLQNEKLYLYYLQNGRDMYVDQELDINR | |
| | LSDYDVDHIVPQSFLKDDSIDNKVLTRSDKARGKSDNVPSEEVVKKMKNYWR | |
| | QLLNAKLITQRKFDNLTKAERGGLSELDKAGFIKRQLVETRQITKHVAQILD | |
| | SRMNTKRDENDKLIREVKIITLKSKLVSDFRKDFGFYKVREINDYHHAHDAY | |
| | LNAVVGLALIKKYPKLESEFVYGDYKVYDVRKMIAKSEQEIGKATAKYFFYS | |
| | NIMNFFKSEITLANGEIRKRPQIETNEETGEIVWNKVKDFATVRKVLSMPQV | |
| | NIVKKTEVQTGGFSKESILPKRESDKLIARKKDWDPKKYGGFDSPTVAYSVL | |
| | VVAKVEKGKAKKLKTVKELVGITIMERSSFEKDPVAFLEAKGYKNIQKDLII | |
| | KLPKYSLFELENGRKRLLASAGELQKGNELALPAKYVTLLYLASNYEKLKGS | |
| | PEDNEQKLEYVEQHKEYFKEILDQIIEFSSRYILADKNLDKVKSLYAEHRDK | |
| | DITELAENFIHLFTLTSLGAPAAFKFFGTTIDRKRYTSTSEILNATLIHQSI | |
| | TGLYETRIDLSQLGGD | |
| CasEnd-98 | MDKKYSIGLDIGTNSVGWAVITDEYKVPSKKFKVLGNTDRKSIKKNLIGALL | 58 |
| | FDSGETAEATRLKRTARRRYTRRKNRICYLQEIFSEEMAKVDDSFFHRLEES | |
| | FLVEEDKRHERHPIFGNIVEEVAYHEKYPTIYHLRKKLVDSDDKADLRLIYL | |
| | ALAHMIKFRGHFLIEGDLNPDNSDVDKLFIQLVQTYNQLFEENPIDAEKVDA | |
| | EAILTERLSKSRRLENLIAELPGEKKNGLFGNLIALSLGLTPNFKSNEDLSE | |
| | DAKLQLSKDTYDEDLENLLGQIGDQYADLFLAAKNLSDAILLSDILRVNTEI | |
| | TKAPLSASMIKRYDEHHQDLTLLKALVRQQLPEKYKEIFFDQSKNGYAGYID | |
| | GGASQEEFYKFIKPILEKMDGTEELLVKLNREDLLRKQRTFDNGSIPHQIHL | |
| | QELHAILRRQEDFYPFLKDNREKIEKILTFRIPYYVGPLARGNSRFAWMTRK | |
| | SDETITPWNFDEVVDKGASAQSFIERMTNFDKNLPNEKVLPKHSLLYEYFTV | |
| | YNELTKVKYVTEGMRKPAFLDGEQKKEIVDLLFKTNRKVTVKQLKEDYFKKI | |
| | DCFDIVEISGVEDRFNASLGTYHDLLKIIKDKDFLDNEENEDILEDIVLTLT | |
| | LFEDREMIEKRLKTYANLFDKKVMKQLKRRRYTGWGRLSRKLINGIRDKQSG | |
| | KTILDFLKSDGFTNRNFMQLIHDDSLTFKEDIQKAQVSGQGDSLHEQIANLA | |
| | GSPAIKKGILQTIKVVDELVKVMGRHKPENIVIEMARENQTTQKGQKNSRER | |
| | MKRIEEGIKELGSKILKEHPVENTQLQNEKLYLYYLQNGRDMYTDQELDINR | |
| | LSDYDVDHIVPQSFLKDDSIDNKVLTSSEKARGKSDDVPSEEVVKKMKPYWR | |
| | QLLNAKLITQRKFDNLTKAERGGLSELDKAGFIKRQLVETRQITKHVAQILD | |
| | SRMNTKYDENDKLIRDVKVITLKSKLVSDFRKDFQFYKVREINNYHHAHDAY | |
| | LNAVVGTALIKKYPKLESEFVYGDYKVYDVRKMVAKSEQEIGKATAKYFFYS | |
| | NIMNFFKTEVKLADGEIRKRPLIEVNEETGEIVWDKGRDFATVRKVLSMPQV | |
| | NIVKKTEVQTGGFSKESILPKRNSDKLIARKKDWDPSKYGGFDSPTVAYSVL | |
| | VIAKIEKGKAKKLKSVKELLGITIMERSSFEKNPVDFLEAKGYQNIQKELII | |
| | KLPKYSLFELENGRKRLLASAGELQKGNELALPNKYVTFLYHAQHYEKLKGK | |
| | PEDEEYKQLFVEQHRHYFDEILEQIIEFSERYILADANLEKIKNLYDQHFDA | |
| | SLREQASNIINLETFTNLGAPAAFKYLDTDIDRKRYTSTKEILNATLIHQSI | |
| | TGLYETRIDLSQLGGD | |
| CasEnd-99 | MKKKYSIGLDIGTNSVGWAVITDEYKVPSKKFKVLGNTDRQSIKKNLIGALL | 59 |
| | FDSGETAEATRLKRTARRRYTRRKNRIRYLQEIFAEEMSKVDDSFFHRLEES | |
| | FLVEEDKRGERHPIFGNIVDEVAYHEKYPTIYHLRKELVDSTEKADLRLIYL | |
| | ALAHMIKFRGHFLIEGDLNSENTDVQKLFKQLVQAYNQLFEESPLNEETVDA | |
| | KAILTEKLSKSRRLENLIAQLPGEKKNGLFGNLIALSLGLTPNFKTNFGLAE | |
| | DAKLQLSKDTYDEDLENLLGQIGDQYADLFLAAKNLSDAILLSDILRVNDEI | |
| | TKAPLSASMIKRYDEHHQDLTLLKTLVREQLPEKYKEIFFDKSKNGYAGYID | |
| | GGASQEEFYKYIKPILEKMDGTEYLLAKLEREDLLRKQRTFDNGSIPHQIHL | |
| | GELHAILRRQEEYYPFLKENQEKIEKILTFRIPYYVGPLARGNSRFAWMSRK | |
| | SDETITPWNFEEVVDKGASAQAFIERMTNFDKNLPNEKVLPKHSLLYEKFTV | |
| | YNELTKVKYVTEGMGKPEFLDAEQKKEIVDGLFKKYRKVTVKKLKEFYFKEF | |
| | DEFRIVDISGVEDRFNASLGTYHDLLKIIKDKDFLDNDENEDILEDIVLTLT | |
| | LFEDREMIEERLKKYADLFDDKVMKQLKRRRYTGWGRLSKKLINGIRDKQSG | |
| | KTILDFLKSDGFANRNFMQLIHDDSLTFKEEIKKAQVKGQKDSLHEQIADLA | |
| | GSPAIKKGILQTVKVVDELVKVMGRHKPENIVIEMARENQTTQKGQKNSRER | |
| | YKRIEEGIKELGSQILKEHPVENTQLQNDKLYLYYLQNGRDMYTGEELDIDR | |
| | LSDYDVDHIVPQSFIKDDSIDNKVLTRSAEARGKSDNVPSEEVVKKMKSYWR | |
| | QLLKAKLITQRKFDNLTKAERGGLTELDKAGFIKRQLVETRQITKHVAQILD | |
| | SRMNTERDENDKLIRDVKVITLKSKLVSDFRKDFGFYKVREINDYHHAHDAY | |
| | LNAVVGTALIKKYPKLESEFVYGDYKVYDSYKMIAKSEQEIGKATAKYFFYS | |
| | NIMNFFKTEITLANGEIRKRPLIETNGETGEIVWDKGRDFATVRKVLSMPQV | |
| | NIVKKTEVQTGGFSKESILPKRNSDKLIARKKDWDPKKYGGFDSPTVAYSVL | |
| | VVAKVEKGKSKKLKSVKELLGITIMERSSFEKNPIDFLEAKGYKEVKKDLII | |
| | KLPKYSLFELENGRKRMLASAGELQKGNELALPSKYVNFLYLASHYEKLKGS | |
| | PEDNEQKQLFVEQHKHYLDEIIEQISEFSKRVILADANLDKVLSAYNKHRDK | |
| | PIREQAENIIHLFTLTNLGAPAAFKYFDTTIDRKRYTSTKEVLDATLIHQSI | |
| | TGLYETRIDLSQLGGD | |
| CasEnd-100 | MKKKYSIGLDIGTNSVGWAVITDEYKVPSKKFKVLGNTDRQSIKKNLIGALL | 60 |
| | FDSGETAEATRLKRTARRRYTRRKNRIRYLQEIFAEEMAKVDDSFFHRLEES | |
| | FLVEEDKKHERHPIFGNIVDEVAYHEKYPTIYHLRKKLVDSTEKADLRLIYL | |
| | ALAHMIKFRGHFLIEGDLNSENSDVDKLFIQLVQTYNQLFEENPINESGVDA | |
| | KAILSAKLSKSRRLENLIAQLPNEKKNGLFGNLIALSLGLTPNFKSNFDLAE | |
| | DAKLQLSKDTYDDDLDNLLAQIGDQYADLFLAAKNLSDAILLSDILRVNTEI | |
| | TKAPLSASMIKRYDEHHQDLTLLKALVRQQLPEKYKEIFFDKSKNGYAGYID | |
| | GGASQEDFYKFIKPILEKMDGTEELLAKLNREDLLRKQRTFDNGSIPHQIHL | |
| | GELHAILRRQEDFYPFLKENREKIEKILTFRIPYYVGPLARGNSRFAWMTRK | |
| | SEETITPWNFEEVVDKGASAQSFIERMTNFDKNLPNEKVLPKHSLLYEYFTV | |
| | YNELTKVKYVTEGMGKPEFLSGEQKKEIVDLLFKKNRKVTVKQLKEFYFKKI | |
| | ECFDSVEISGVEDRFNASLGTYHDLLKIIKDKDFLDNEENEDILEDIVLTLT | |
| | LFEDREMIEERLKKYANLFDKKVMKQLKRRRYTGWGRLSRKLINGIRDKQSG | |
| | KTILDFLKSDGFANRNFMQLIHDDSLTFKEEIKKAQVSGQGESLHEQIANLA | |
| | GSPAIKKGILQTVKVVDELVKVMGRHKPENIVIEMARENQTTQKGQKNSRER | |
| | MKRIEEGIKELGSQILKEHPVENTQLQNDKLYLYYLQNGRDMYTGQELDINR | |
| | LSDYDVDHIVPQSFLKDDSIDNKVLTRSAEARGKSDNVPSEEVVKKMKNYWR | |
| | QLLKAKLITQRKFDNLTKAERGGLSELDKAGFIKRQLVETRQITKHVAQILD | |
| | SRMNTKYDENDKLIRDVKVITLKSKLVSDFRKDFQFYKVREINNYHHAHDAY | |
| | LNAVVGTALIKKYPKLESEFVYGDYKVYDVRKMIGKSEQEIGKATAKYFFYS | |
| | NIMNFFKTEITLANGEIRKRPLIETNEETGEIVWDKERDFATVRKVLSMPQV | |
| | NIVKKTEVQTGGFSKESILPKRESDKLIARKKDWDPKKYGGFDSPTVAYSVL | |
| | VVAKVEKGKSKKLKTVKELLGITIMERSSFEKDPVAFLEAKGYKEVKKDLII | |
| | KLPKYSLFELENGRKRMLASAGELQKGNELALPSKYVNFLYLASHYEKLKGS | |
| | PEDNEKKQEYVEQHKHYLDEIIDQISEFSERVILADKNLEKVLSAYNEHRNK | |
| | SIEEQAENIIHLFTLTNLGAPAAFKYFGTTIDRKRYTSTKEVLNATLIHQSI | |
| | TGLYETRIDLSQLGGD | |
| CasEnd-101 | MDKKYSIGLDIGTNSVGWAVITDEYKVPSKKFKVLGNTDRHSIKKNLIGALL | 61 |
| | FDSGETAEATRLKRTARRRYTRRKNRIRYLQEIFSNEMAKVDDSFFHRLEES | |
| | FLVEEDKKHERHPIFGNIVDEVAYHEKYPTIYHLRKKLADSTEKADLRLIYL | |
| | ALAHMIKFRGHFLIEGDLNSDNSDVDKLFIQLVQTYNQLFEENPINEEGVDA | |
| | KAILSARLSKSRRLENLIAQFPGEKKNGLFGNLIALSLGLTPNFKSNEDLAE | |
| | DAKLQLSKDTYDEDLENLLGQIGDQYADLFLAAKNLSDAILLSDILTVNDEI | |
| | TKAPLSASMVKRYDEHHQDLTLLKKLVRQQLPEKYKEIFFDQSKNGYAGYID | |
| | GGASQEEFYKYIKPILEKMDGSEEFLEKINREDFLRKQRTFDNGSIPHQIHL | |
| | GELHAILRRQEKYYPFLKDNREKIEKILTFRIPYYVGPLARGNSRFAWMTRK | |
| | SEETITPWNFEEVVDKEASAQKFIERMTNFDKNLPNEKVLPKHSLLYEYFTV | |
| | YNELTKVKYVTEGMRKPEFLSGEQKKEIVDLLFKKNRKVTVKQLKEDYFKKI | |
| | ECFDSVEISGVEDRFNASLGTYHDLLKIIKDKDELDNEENEDILEDIVLTLT | |
| | LFEDREMIEERLKKYAHLFDDKVLKQLKRRRYTGWGRLSRKLINGIRDKQSG | |
| | KTILDFLKSDGFANRNFMQLIHDDSLTFKEEIKKAQVSGQGDSLHEQIANLA | |
| | GSPAIKKGILQTVKIVDELVKVMGRHKPENIVIEMARENQTTQKGQKNSRER | |
| | MKRLEEGIKELGSKILKEHPVENTQLQNEKLYLYYLQNGKDMYTGEELDIDR | |
| | LSDYDVDHIVPQSFLKDDSIDNKVLVSSEKARGKSDNVPSEEVVKKMKNYWR | |
| | QLLEAKLITQRKFDNLTKAERGGLTELDKAGFIKRQLVETRQITKHVAQILD | |
| | SRFNTKYDENDKLIRDVKIITLKSKLVSDFRKDFQFYKVREINNYHHAHDAY | |
| | LNAVVGTALIKKYPKLESEFVYGDYKVYDVRKMIAKSEQEIGKATAKYFFYS | |
| | NIMNFFKTEITLANGEIRKRPLIETNEETGEIVWDKEKDFATVRKVLSMPQV | |
| | NIVKKTEVQTGGFSKESILPKRNSDKLIARKKDWDPKKYGGFDSPTVAYSVL | |
| | VVAKVEKGKSKKLKTVKELVGITIMERSSFEKNPIDFLEAKGYKEVKKDLII | |
| | KLPKYSLFELENGRKRMLASAGELQKGNELALPSKYVTLLYLASHYEKLKGS | |
| | PEDNEQKQLFVEQHKHYFDEIIEQISEFSKRVILADANLEKILSLYNKNRDK | |
| | SIEEQAENFINLFTFTNLGAPAAFKFFDTTIDRKRYTSTKEILDATLIHQSI | |
| | TGLYETRIDLSQLGGD | |
| CasEnd-102 | MDKKYSIGLDIGTNSVGWAVITDEYKVPSKKFKVLGNTDRHSIKKNLIGALL | 62 |
| | FDSGETAEATRLKRTARRRYTRRKNRICYLQEIFSNEMAKVDDSFFHRLEES | |
| | FLVEEDKRHERHPIFGNIVDEVAYHEKYPTIYHLRKKLADSDEKADLRLIYL | |
| | ALAHMIKFRGHFLIEGDLNSENSDVQKLFKQLVQTYNQLFEESPLNEEGVDA | |
| | KAILTEKLSKSRRLENLIAQFPGEKKNGLFGNLIALSLGLTPNFKSNEDLSE | |
| | DAKLQFSKDTYDEDLENLLGQIGDQYADLFLAAKNLYDAILLSGILTVNDEI | |
| | TKAPLSASMVKRYDEHHQDLTLLKQFVRQQLPEKYKEIFFDQSKNGYAGYID | |
| | GGASQEEFYKYLKKILEKIDGSEEFLEKINREDFLRKQRTFDNGSIPHQIHL | |
| | QELHAILRRQEKYYPFLKENQEKIEKILTFRIPYYVGPLARGNSRFAWMSRK | |
| | SDETITPWNFEDVVDKEASAEKFIERMTNFDKNLPEEKVLPKHSLLYEKFTV | |
| | YNELTKVKYVTEGMRKPVFFSAEQKQEIVDLLFKKNRKVTKKQLKEYLFKEF | |
| | ECFDSVEISGVEDRFNASLGTYHDLLKIIKDKDELDNPENEKILEDIVLTLT | |
| | LFEDREMIKKRLEKYADLFDKKQLKKLKRRRYTGWGRLSAKLINGIRDKQSG | |
| | KTILDYLIEDGFANRNFMQLIHDDSLTFKEEIEKAQVIGQGDSLHEHIANLA | |
| | GSPAIKKGILQTVKVVDELVKVMGRHKPENIVIEMARENQTTQKGQKNSRER | |
| | MKRIEEGIKELGSQILKEHPVENTQLQNEKLYLYYLQNGRDMYVDQELDINR | |
| | LSDYDVDHIVPQSFLKDDSIDNKVLTRSDKARGKSDNVPSEEVVKKMKNYWR | |
| | QLLNAKLITQRKFDNLTKAERGGLSELDKAGFIKRQLVETRQITKHVAQILD | |
| | SRMNTKYDENDKLIREVKVITLKSKLVSDFRKDFQFYKVREINNYHHAHDAY | |
| | LNAVVGTALIKKYPKLESEFVYGDYKVYDVRKMIAKSEQEIGKATAKYFFYS | |
| | NIMNFFKTEITLANGEIRKRPLIETNGETGEIVWDKGRDFATVRKVLSMPQV | |
| | NIVKKTEVQTGGFSKESILPKRNSDKLIARKKDWDPKKYGGFDSPTVAYSVL | |
| | VVAKVEKGKSKKLKSVKELLGITIMERSSFEKNPIDFLEAKGYKEVKKDLII | |
| | KLPKYSLFELENGRKRMLASAGELQKGNELALPSKYVNFLYLASHYEKLKGS | |
| | PEDNEQKQLFVEQHKHYLDEIIEQISEFSKRVILADANLDKVLSAYNKHRDK | |
| | PIREQAENIIHLFTLTNLGAPAAFKYFDTTIDRKRYTSTKEVLDATLIHQSI | |
| | TGLYETRIDLSQLGGD | |
| CasEnd-103 | MDKKYSIGLDIGTNSVGWAVITDEYKVPSKKFKVLGNTDRHSIKKNLIGALL | 63 |
| | FDSGETAEATRLKRTARRRYTRRKNRICYLQEIFSNEMAKVDDSFFHRLEES | |
| | FLVEEDKKHERHPIFGNIVDEVAYHEKYPTIYHLRKKLADSTEKADLRLIYL | |
| | ALAHIIKFRGHFLIEGDLNSDNSDVDKLFIQLVQTYNQLFEENPINESGVDA | |
| | KAILSAKLSKSRRLENLIAQLPGEKKNGLFGNLIALSLGLTPNFKSNEDLSE | |
| | DAKLQLSKDTYDDDLDNLLAQIGDQYADLFLAAKNLSDAILLSDILTVNSEI | |
| | TKAPLSASMIKRYDEHHQDLTLLKALVRQQLPEKYKEIFFDQSKNGYAGYID | |
| | GGASQEEFYKFIKPILEKMDGTEELLEKLNREDFLRKQRTFDNGSIPHQIHL | |
| | GELHAILRRQEDFYPFLKENREKIEKILTFRIPYYVGPLARGNSRFAWMTRK | |
| | SDETITPWNFEEVVDKGASAQAFIERMTNFDKNLPDEKVLPKHSLLYEYFTV | |
| | YNELTKVKYVTEGMRKPEFLSGEQKKEIVDLLFKKNRKVTVKQLKEDLFKEI | |
| | ECFDSVEISGVEDRFNASLGTYHDLLKIIKDKDFLDNEENEDILEDIVLTLT | |
| | LFEDREMIEERLKKYANLFDKKVLKQLKRRRYTGWGRLSRKLINGIRDKQSG | |
| | KTILDFLKSDGFANRNFMQLIHDDSLTFKEEIQKAQVIGQGDSLHEHIANLA | |
| | GSPAIKKGILQTVKVVDELVKVMGRHKPENIVIEMARENQTTQKGQKNSRER | |
| | MKRIEEGIKELGSQILKEHPVENTQLQNEKLYLYYLQNGRDMYVDQELDINR | |
| | LSDYDVDHIVPQSFLKDDSIDNKVLTRSDKARGKSDNVPSEEVVKKMKNYWR | |
| | QLLNAKLITQRKFDNLTKAERGGLSELDKAGFIKRQLVETRQITKHVAQILD | |
| | SRMNTKYDENDKLIREVKVITLKSKLVSDFRKDFQFYKVREINNYHHAHDAY | |
| | LNAVVGTALIKKYPKLESEFVYGDYKVYDVRKMIAKSEQEIGKATAKYFFYS | |
| | NIMNFFKTEITLANGEIRKRPLIETNGETGEIVWDKGRDFATVRKVLSMPQV | |
| | NIVKKTEVQTGGFSKESILPKRNSDKLIARKKDWDTKKYGGFDSPTVAYSVL | |
| | VVAKVEKGKAKKLKTVKELVGITIMERSSFEKDPVSFLEAKGYKEVQKDLII | |
| | KLPKYSLFELENGRKRLLASAGELQKGNELALPSKYVTFLYLAKHYEKLKGS | |
| | PEDNEQKQLYVEQHKNYFDEILDQISEFSKRYILADANLEKILSLYSNNEDK | |
| | PISEQASSFINLFTLTNLGAPAAFKFFDTTIDRKRYTSTKEILNATLIHQSI | |
| | TGLYETRIDLSQLGGD | |
| CasEnd-104 | MDKKYSIGLDIGTNSVGWAVITDEYKVPSKKFKVLGNTDRHSIKKNLIGALL | 64 |
| | FDSGETAEATRLKRTARRRYTRRKNRICYLQEIFSNEMAKVDDSFFHRLEES | |
| | FLVEEDKKNERHPIFGNIVDEKAYHEKYPTIYHLRKKLADSDEKADLRLIYL | |
| | ALAHMIKFRGHFLIEGDLNSDNSDVQKLFKQLVQTYNQLFEENPLNEETVDA | |
| | KAILTEKLSKSRRLENLIAQFPGEKKNGLFGNLIALSLGLTPNFKSNFDLAE | |
| | DAKLQLSKDTYDEDLENLLGQIGDEYADLFLAAKNLYDAILLSDILTVNDEI | |
| | TKAPLSASMVKRYEEHQKDLKLLKKFVRQQLPEKYKEIFSDKSKNGYAGYID | |
| | GGTSQEEFYKYLKKILEKMDGSEEFLEKIEREDFLRKQRTFDNGSIPHQIHL | |
| | QELHAILRRQEEYYPFLKENREKIEKILTFRIPYYVGPLARGNSRFAWMTRK | |
| | SDEKITPWNFDEVVDKEASAQKFIERMINNDLYLPEEKVLPKHSLLYEKFTV | |
| | YNELTKVKYVTEGMRKPEFFSAEQKQEIFDLLFKKNRKVTKKKLKEYLFKKF | |
| | ECFDIVEISGLEDRFNASLGTYHDLLKIIKDKDELDNEENEEILEDIVLTLT | |
| | LFEDREMIKKRLKKYADLFDDKVLKKLKRRHYTGWGRLSKKLINGIRDKQSG | |
| | KTILDYLISDGFANRNFMQLIHDDSLTFKEEIEKAQVSGDGDSLHEHIANLA | |
| | GSPAIKKGILQTVKVVDELVKVMGRHKPENIVIEMARENQTTQKGQRNSRQR | |
| | LKRLEEGIKELGSDILKEHPVENTQLQNDRLYLYYLQNGKDMYTGEELDIDR | |
| | LSDYDIDHIIPQSFIKDDSIDNKVLVSSKKARGKSDNVPSEEVVKKMKNYWR | |
| | KLLDAKLISQRKFDNLTKAERGGLSELDKAGFIKRQLVETRQITKHVAQILD | |
| | SRMNTKYDENDKLIREVKVITLKSKLVSDFRKDFQFYKVREINNYHHAHDAY | |
| | LNAVVGTALIKKYPKLESEFVYGDYKVYDVRKMIAKSEQEIGKATAKYFFYS | |
| | NIMNFFKTEITLANGEIRKRPLIETNGETGEIVWDKGRDFATVRKVLSMPQV | |
| | NIVKKTEVQTGGFSKESILPKRNSDKLIARKKDWDPKKYGGFDSPTVAYSVL | |
| | VVAKVEKGKSKKLKSVKELLGITIMERSSFEKNPIDFLEAKGYKEVKKDLII | |
| | KLPKYSLFELENGRKRMLASAGELQKGNELALPSKYVNFLYLASHYEKLKGS | |
| | PEDNEQKQLFVEQHKHYLDEIIEQISEFSKRVILADANLDKVLSAYNKHRDK | |
| | PIREQAENIIHLFTLINLGAPAAFKYFDTTIDRKRYTSTKEVLDATLIHQSI | |
| | TGLYETRIDLSQLGGD | |
| CasEnd-105 | MDKKYSIGLDIGTNSVGWAVITDEYKVPSKKFKVLGNTDRHSIKKNLIGALL | 65 |
| | FDSGETAEATRLKRTARRRYTRRKNRICYLQEIFSNEMAKVDDSFFHRLEES | |
| | FLVEEDKKHERHPIFGNIVEEVAYHEKYPTIYHLRKKLADSDEKADLRLIYL | |
| | ALAHIIKFRGHFLIEGDLNSDNSDVQKLFKQLVQTYNQLFEESPLQEEGVDA | |
| | KAILSEKLSKSRRLENLIAQFPGEKKNGLFGNLIALSLGLTPNFKSNFDLSE | |
| | DAKLQLSKDTYDEDLENLLGQIGDQYADLFLAAKNLYDAILLSGILTVNDEI | |
| | TKAPLSASMVKRYDEHHQDLTLLKQLVREQLPEKYKEIFFDQSKNGYAGYID | |
| | GGASQEEFYKYIKKILEKIDGSEEFLDKINREDFLRKQRTFDNGSIPHQIHL | |
| | QELHAILRRQEKYYPFLKENREKIEKILTFRIPYYVGPLARGNSRFAWMSRK | |
| | SDETITPWNFEEVVDKEASAQAFIERMTNFDKNLPEEKVLPKHSLLYEKFTV | |
| | YNELTKVKYVTEGMRKPEFLSAEQKQEIFDLLFKKNRKVTKKQLKEYLFKNF | |
| | ECFDIVEISGVEDRFNASLGTYHDLLKIIKDKDFLDNEENEEILEDIVLTLT | |
| | LFEDREMIKERLEKYADLFDKKQLKKLKRRRYTGWGRLSKKLINGIRDKQSG | |
| | KTILDFLISDGFANRNFMQLIHDDSLTFKEEIEKAQVSGKGDSLHEHIANLA | |
| | GSPAIKKGILQTVKVVDELVKVMGRHKPENIVIEMARENQTTQKGQKNSRER | |
| | MKRIEEGIKELGSQILKEHPVENTQLQNEKLYLYYLQNGRDMYVDQELDINR | |
| | LSDYDVDHIVPQSFLKDDSIDNKVLTRSDKARGKSDNVPSEEVVKKMKNYWR | |
| | QLLNAKLITQRKFDNLTKAERGGLSELDKAGFIKRQLVETRQITKHVAQILD | |
| | SRMNTKYDENDKLIREVKVITLKSKLVSDFRKDFQFYKVREINNYHHAHDAY | |
| | LNAVVGTALIKKYPKLESEFVYGDYKVYDVRKMIAKSEQEIGKATAKYFFYS | |
| | NIMNFFKTEITLANGEIRKRPLIETNGETGEIVWDKGRDFATVRKVLSMPQV | |
| | NIVKKTEVQTGGFSKESILPKRNSDKLIARKKDWDPKKYGGFDSPTVAYSVL | |
| | VVAKVEKGKSKKLKSVKELLGITIMERSSFEKNPIDFLEAKGYKEVKKDLII | |
| | KLPKYSLFELENGRKRMLASAGELQKGNELALPSKYVNFLYLASHYEKLKGS | |
| | PEDNEQKQLFVEQHKHYLDEIIEQISEFSKRVILADANLDKVLSAYNKHRDK | |
| | PIREQAENIIHLFTLTNLGAPAAFKYFDTTIDRKRYTSTKEVLDATLIHQSI | |
| | TGLYETRIDLSQLGGD | |
| CasEnd-106 | MKKKYSIGLDIGTNSVGWAVITDEYKVPSKKFKVLGNTDRSSIKKNLIGALL | 66 |
| | FDSGETAEATRLKRTARRRYTRRKNRIRYLQEIFAEEMSKVDDSFFHRLEES | |
| | FLVEEDKRDERHPIFGNIVDEVAYHEKYPTIYHLRKELVDSTEKADLRLIYL | |
| | ALAHMIKFRGHFLIEGDLNSENTDVQKLFIQLVQTYNQTFEENPLSEETVDA | |
| | EAILTDKLSKSRRLENLIAQFPNEKRNGLFGNLIALSLGLTPNFKSNENLAE | |
| | DAKLQFSKDTYDEDLENLLAQIGDQYADLFLAAKNLYDAILLSGILRVNDES | |
| | TKAPLSASMIKRYDEHHQDLTLLKQLVRQQLPEKYKEIFFDKSKNGYAGYID | |
| | GGASQEEFYKFIKPILEKMDGTEELLAKLNREDLLRKQRTFDNGSIPHQIHL | |
| | GELHAILRRQEEYYPFLKENQEKIEKILTFRIPYYVGPLARGNSRFAWMTRK | |
| | SDETITPWNFEEVVDKGASAEAFIERMTNFDKNLPEEKVLPKHSLLYEKFTV | |
| | YNELTKVKYVTEGMGKPQFLDAEQKKEIVDLLFKKDRKVTVKQLKEFYFKEI | |
| | DCFRIVDISGVEDRFNASLGTYHDLLKIIKDKAFLDNEENEKILEDIVLTLT | |
| | LFEDREMIKKRLEKYANLFDKKVMKKLKRRRYTGWGRLSRKLINGIRDKQSG | |
| | KTILDFLISDGFANRNFMQLIHDDSLTFKEEIKKAQVEGQGESLHEQIADLA | |
| | GSPAIKKGILQTVKVVDELVKVMGRHKPENIVIEMARENQTTQKGQKNSRER | |
| | LKRIEEGIKELGSQILKEHPVENTQLQNEKLYLYYLQNGRDMYTGEELDIDR | |
| | LSDYDVDHIVPQSFIKDDSIDNKVLTRSKEARGKSDDVPSEEVVRKMKSYWR | |
| | QLLKAKLITQRKFDNLTKAERGGLTELDKAGFIKRQLVETRQITKHVAQILD | |
| | SRMNTERDENDKLIRDVKVITLKSKLVSDFRKDFEFYKVREINDYHHAHDAY | |
| | LNAVVGTALIKKYPKLESEFVYGDYPVYNSYKMIAKSEQEIGKATAKYFFYS | |
| | NIMNFFKTEITLANGEIRKRPLIETNGETGEIVWDKGRDFATVRKVLSMPQV | |
| | NIVKKTEVQTGGFSKESILPKRNSDKLIARKKDWDPKKYGGFDSPTVAYSVL | |
| | VVAKVEKGKSKKLKSVKELLGITIMERSSFEKNPIDFLEAKGYKEVKKDLII | |
| | KLPKYSLFELENGRKRMLASAGELQKGNELALPSKYVNFLYLASHYEKLKGS | |
| | PEDNEQKQLFVEQHKHYLDEIIEQISEFSKRVILADANLDKVLSAYNKHRDK | |
| | PIREQAENIIHLFTLTNLGAPAAFKYFDTTIDRKRYTSTKEVLDATLIHQSI | |
| | TGLYETRIDLSQLGGD | |
| CasEnd-107 | MKKKYSIGLDIGTNSVGWAVITDEYKVPSKKFKVLGNTDRHSIKKNLIGALL | 67 |
| | FDSGETAEATRLKRTARRRYTRRKNRIRYLQEIFSEEMAKVDDSFFHRLEES | |
| | FLVEEDKKHERHPIFGNIVDEVAYHEKYPTIYHLRKKLADSTEKADLRLIYL | |
| | ALAHMIKFRGHFLIEGDLNSDNSDVDKLFIQLVQTYNQLFEENPINEEGVDA | |
| | KAILSAKLSKSRRLENLIAQLPGEKKNGLFGNLIALSLGLTPNFKSNEDLAE | |
| | DAKLQLSKDTYDDDLDNLLAQIGDQYADLFLAAKNLSDAILLSDILTVNSEI | |
| | TKAPLSASMIKRYDEHHQDLTLLKALVRQQLPEKYKEIFFDQSKNGYAGYID | |
| | GGASQEEFYKYIKPILEKMDGTEELLAKLNREDFLRKQRTFDNGSIPHQIHL | |
| | GELHAILRRQEDFYPFLKENREKIEKILTFRIPYYVGPLARGNSRFAWMTRK | |
| | SEETITPWNFEEVVDKGASAQSFIERMTNFDKNLPNEKVLPKHSLLYEYFTV | |
| | YNELTKVKYVTEGMRKPEFLSGEQKKAIVDLLFKKNRKVTVKQLKEDYFKKI | |
| | ECFDSVEISGVEDRFNASLGTYHDLLKIIKDKDFLDNEENEDILEDIVLTLT | |
| | LFEDKEMIEERLKKYANLFDDKVLKQLKRRRYTGWGRLSRKLINGIRDKQSG | |
| | KTILDFLKSDGFANRNFMQLIHDDSLTFKEEIQKAQVSGQGDSLHEQIANLA | |
| | GSPAIKKGILQTVKIVDELVKVMGRHKPENIVIEMARENQTTQKGQKNSRER | |
| | MKRIEEGIKELGSQILKEHPVENTQLQNEKLYLYYLQNGKDMYTGQELDIDR | |
| | LSDYDVDHIIPQSFIKDDSIDNKVLTSSDKARGKSDNVPSEEVVKKMKNYWR | |
| | QLLNAKLISQRKFDNLTKAERGGLSELDKAGFIKRQLVETRQITKHVAQILD | |
| | SRFNTEYDENDKLIRDVKIITLKSKLVSDFRKDFQFYKVREINNYHHAHDAY | |
| | LNAVVGTALIKKYPKLESEFVYGDYKVYDVRKMIAKSEQEIGKATAKRFFYS | |
| | NIMNFFKTEITLANGEIRKRPLIETNEETGEIVWDKGKDFATVRKVLSMPQV | |
| | NIVKKTEVQTGGFSKESILPKRNSDKLIARKKDWDTKKYGGFDSPTVAYSVL | |
| | VVAKVEKGKTKKLKTVKELVGITIMERSSFEKDPVDFLEAKGYKEIQKDLII | |
| | KLPKYSLFELENGRKRMLASAGELQKGNELALPSKYVTFLYLASHYEKLKGS | |
| | PEDEEQKQLYVEQHRHYFDEIVEQISEFSERYILADKNLEKILSLYNEFEDK | |
| | PIEEQAENFINLFTLTALGAPAAFKFFDTTIDRKRYTSTKEILDATLIHQSI | |
| | TGLYETRIDLSQLGGD | |
| CasEnd-108 | MDKKYSIGLDIGTNSVGWAVITDEYKVPSKKFKVLGNTDRHSIKKNLIGALL | 68 |
| | FDSGETAEATRLKRTARRRYTRRKNRICYLQEIFSNEMAKVDDSFFHRLEES | |
| | FLVEEDKKHERHPIFGNIVDEVAYHEKYPTIYHLRKELADSTEKADLRLIYL | |
| | ALAHMIKFRGHFLIEGDLNSENSDVQKLFIQLVQTYNQLFEENPINEEGVDA | |
| | KAILTAKLSKSRRLENLIAQFPGEKKNGLFGNLIALSLGLTPNFKSNFVLSE | |
| | DAKLQLSKDTYDEDLENLLGQIGDQYADLFLAAKNLSDAILLSDILTVNSEI | |
| | TKAPLSASMIKRYDEHHQDLTLLKNLVRQQLPEKYKEIFFDKSKNGYAGYID | |
| | GGASQEEFYKYIKPILEKMDGTEEFLAKIEREDFLRKQRTFDNGSIPHQIHL | |
| | KELHAILRRQEEYYPFLKENREKIEKILTFRIPYYVGPLARGNSRFAWMTRK | |
| | SDETITPWNFEEVVDKEASAQAFIERMTNFDKNLPNEKVLPKHSLLYEYFTV | |
| | YNELTKVKYVTEGMGKPQFLSAEQKQEIVDLLFKKERKVTKKQLKDFLFKEI | |
| | EEFDSVEISGVEDAFNASLGTYHDLLKIIKDKDFLDNEENEDILEDIILTLT | |
| | LFEDREMIEKRLKKYANLFDKKVLKQLKRRRYTGWGRLSKKLINGIRDKQSG | |
| | KTILDFLKSDGFANRNFMQLIHDDSLTFKEEIQKAQVSGQGDSLHEHIANLA | |
| | GSPAIKKGILQTVKVVDELVKVMGRHKPENIVIEMARENQTTQKGQKNSRER | |
| | MKRIEEGIKELGSQILKEHPVENTQLQNEKLYLYYLQNGRDMYVDQELDINR | |
| | LSDYDVDHIVPQSFLKDDSIDNKVLTRSDKARGKSDNVPSEEVVKKMKNYWR | |
| | QLLNAKLITQRKFDNLTKAERGGLSELDKAGFIKRQLVETRQITKHVAQILD | |
| | SRMNTKYDENDKLIREVKVITLKSKLVSDFRKDFQFYKVREINNYHHAHDAY | |
| | LNAVVGTALIKKYPKLESEFVYGDYKVYDVRKMIAKSEQEIGKATAKYFFYS | |
| | NIMNFFKTEITLANGEIRKRPLIETNGETGEIVWDKGRDFATVRKVLSMPQV | |
| | NIVKKTEVQTGGFSKESILPKRNSDKLIARKKDWDPKKYGGFDSPTVAYSVL | |
| | VVAKVEKGKSKKLKSVKELLGITIMERSSFEKNPIDFLEAKGYKEVKKDLII | |
| | KLPKYSLFELENGRKRMLASAGELQKGNELALPSKYVNFLYLASHYEKLKGS | |
| | PEDNEQKQLFVEQHKHYLDEIIEQISEFSKRVILADANLDKVLSAYNKHRDK | |
| | PIREQAENIIHLFTLTNLGAPAAFKYFDTTIDRKRYTSTKEVLDATLIHQSI | |
| | TGLYETRIDLSQLGGD | |
| CasEnd-109 | MDKKYSIGLDIGTNSVGWAVITDEYKVPSKKFKVLGNTDRHSIKKNLIGALL | 69 |
| | FDSGETAEATRLKRTARRRYTRRKNRICYLQEIFSNEMAKVDDSFFHRLEES | |
| | FLVEEDKRGERHPIFGNIADEKAYHEKYPTIYHLRKKLADSTEKADLRLIYL | |
| | ALAHMIKFRGHFLIEGDLNSDNSDVQKLFDELVQTYNQLFEESPLNEETVDA | |
| | EAILTEKLSKSRRLENLIAQFPGEKKNGLFGNLIALSLGLTPNFKSNFDLSE | |
| | DAKLQFSKDTYDEDLEELLGQIGDEYADLFLAAKNLYDAILLSGILTVNDES | |
| | TKAPLSASMVKRYEEHQQDLKLLKKFIRQQLPEKYKEIFSDKSKNGYAGYID | |
| | GKTSQEEFYKYLKKILEKLDGSEEFLDKIEREDFLRKQRTFDNGSIPHQIHL | |
| | NELHAILRRQEEYYPFLKENQEKIEKILTFRIPYYVGPLARGNSRFAWMERK | |
| | SDEKITPWNFDEVVDKEASAEKFIERMTNNDLYLPEEKVLPKHSLLYEKFTV | |
| | YNELTKVKYVTEGMRKPEFLSAEQKQEIFDLLFKKNRKVTKKKLKEYLFKKF | |
| | ECFDIVEITGLDDRFNASLGTYHDLLKIIKDKDFLDNDENEEILEDIVLTLT | |
| | LFEDREMIKKRLEKYADLFDKKQLKKLKRRHYTGWGRLSKKLINGIRDKQSG | |
| | KTILDYLIDDGFANRNFMQLIHDDSLTFKEEIQKAQVIGDGDSLHEHIANLA | |
| | GSPAIKKGILQTVKVVDELVKVMGRHKPENIVIEMARENQTTQKGQRNSRQR | |
| | LKRIEEAIKELGSKILKEHPVENQQLQNDRLYLYYLQNGRDMYTGEELDIDR | |
| | LSQYDIDHIIPQSFIKDDSIDNRVLVSSAKARGKSDNVPSEEVVKKMKSYWK | |
| | KLLDAKLISQRKFDNLTKAERGGLSELDKAGFIKRQLVETRQITKHVAQILD | |
| | SRMNTKYDENDKLIREVKVITLKSKLVSDFRKDFQFYKVREINNYHHAHDAY | |
| | LNAVVGTALIKKYPKLESEFVYGDYKVYDVRKMIAKSEQEIGKATAKYFFYS | |
| | NIMNFFKTEITLANGEIRKRPLIETNGETGEIVWDKGRDFATVRKVLSMPQV | |
| | NIVKKTEVQTGGFSKESILPKRNSDKLIARKKDWDPKKYGGFDSPTVAYSVL | |
| | VVAKVEKGKSKKLKSVKELLGITIMERSSFEKNPIDFLEAKGYKEVKKDLII | |
| | KLPKYSLFELENGRKRMLASAGELQKGNELALPSKYVNFLYLASHYEKLKGS | |
| | PEDNEQKQLFVEQHKHYLDEIIEQISEFSKRVILADANLDKVLSAYNKHRDK | |
| | PIREQAENIIHLFTLTNLGAPAAFKYFDTTIDRKRYTSTKEVLDATLIHQSI | |
| | TGLYETRIDLSQLGGD | |
| CasEnd-110 | MDKKYSIGLDIGTNSVGWAVITDEYKVPSKKFKVLGNTDRHSIKKNLIGALL | 70 |
| | FDSGETAEATRLKRTARRRYTRRKNRICYLQEIFSNEMAKVDDSFFHRLEES | |
| | FLVEEDKKHERHPIFGNIVDEVAYHEKYPTIYHLRKKLVDSTDKADLRLIYL | |
| | ALAHMIKFRGHFLIEGDLNPDNSDVQKLFIQLVQTYNQLFEESPLNEEGVDA | |
| | KAILSARLSKSRRLENLISQFPGEKKNGLFGNLIALSLGLTPNFKSNFDLAE | |
| | DAKLQLSKDTYDEDLENLLGQIGDQYADLFLAAKKLSDAILLSGILTVNTEI | |
| | TKAPLSASMIKRYDEHHQDLTLLKALVRQQLPEKYKEIFFDQSKNGYAGYID | |
| | GGASQEEFYKFIKPILEKMDGTEELLVKLNREDLLRKQRTFDNGSIPHQIHL | |
| | GELHAILRRQEDFYPFLKDNREKIEKILTFRIPYYVGPLARGNSRFAWMTRK | |
| | SEETITPWNFEEVVDKGASAQSFIERMTNFDKNLPNEKVLPKHSLLYEYFTV | |
| | YNELTKVKYVTEGMRKPAFLSGEQKKAIVDLLFKTNRKVTVKQLKEDYFKKI | |
| | ECFDSVEISGVEDRFNASLGTYHDLLKIIKDKDFLDNEENEDILEDIVLTLT | |
| | LFEDREMIEERLKTYAHLFDDKVMKQLKRRRYTGWGRLSRKLINGIRDKQSG | |
| | KTILDFLKSDGFANRNFMQLIHDDSLTFKEDIQKAQVSGQGDSLHEHIANLA | |
| | GSPAIKKGILQTVKVVDELVKVMGRHKPENIVIEMARENQTTQKGQKNSRER | |
| | MKRIEEGIKELGSQILKEHPVENTQLQNEKLYLYYLQNGRDMYVDQELDINR | |
| | LSDYDVDHIVPQSFLKDDSIDNKVLTRSDKARGKSDNVPSEEVVKKMKNYWR | |
| | QLLNAKLITQRKFDNLTKAERGGLSELDKAGFIKRQLVETRQITKHVAQILD | |
| | SRMNTKYDENDKLIREVKVITLKSKLVSDFRKDFQFYKVREINNYHHAHDAY | |
| | LNAVVGTALIKKYPKLESEFVYGDYKVYDVRKMIAKSEQEIGKATAKYFFYS | |
| | NIMNFFKTEITLANGEIRKRPLIETNGETGEIVWDKGRDFATVRKVLSMPQV | |
| | NIVKKTEVQTGGFSKESILPKRDSDKLIARKKDWDTKKYGGFDSPTVAYSVL | |
| | VIAKVEKGKAKKLKTVKELVGITIMERSAFEKNPVAFLEDKGYKNIQKDLII | |
| | KLPKYSLFELENGRKRLLASAGELQKGNELALPNKYVTLLYHASNYEKLKGS | |
| | PEDNEQKRLYVEQHKDYFDEILDQIIEFSKRYILADANLEKIKSLYEKNEDS | |
| | SIEELATSFINLLTFTALGAPAAFKFFGTDIDRKRYTSTKEILNATLIHQSI | |
| | TGLYETRIDLSQLGGD | |
| CasEnd-111 | MKKKYSIGLDIGTNSVGWAVVTDEYKVPSKKFKVLGNTDRTSIKKNLLGALL | 71 |
| | FDSGETAEATRLKRTARRRYTRRKNRIRYLQEIFSNEMSKVDDSFFHRLEES | |
| | FLVEEDKKHERHPIFGNIVDEVAYHEKYPTIYHLRKHLADSTEKADLRLIYL | |
| | ALAHIIKFRGHFLIEGDLNIDNSDVQKLFIQLVQTYNNLFEENHLNESGVDA | |
| | KAILTAALSKSRRLENLIAQFPGEKKNGLFGNLIALSLGLTPNFKSNEDLEE | |
| | DAKLQLSKDTYDEDLDNLLAQIGDQYADLFLAAKNLSDAILLSGILTVNDEV | |
| | TKAPLSASMIKRYDEHHQDLTLLKNFVRQQLPEKYKEIFFDESKNGYAGYID | |
| | GGASQEEFYKYIKPILEKMDGAEEFLAKINREDFLRKQRTFDNGSIPHQIHL | |
| | GELHAILRRQEDFYPFLKDNREKIEKILTFRIPYYVGPLARGNSRFAWMTRK | |
| | SDETITPWNFEEVVDKEASAQAFIERMTNFDKNLPNEKVLPKHSLLYEYFTV | |
| | YNELTKVKYVTEGMGKPEFLSSEQKEEIVDLLFKTNRKVTVKQLKEDYFKKI | |
| | ECFDSVEISGVEDRFNASLGTYHDLLKIIKDKDFLDNEENEDILEDIVLTLT | |
| | LFEDREMIEERLEKYANLFDDKVLKKLKRRRYTGWGRLSKKLINGIRDKQSG | |
| | KTILDFLKDDGFANRNFMQLIHDDSLTFKEAIQKAQVIGQGDSLHEQIANLA | |
| | GSPAIKKGILQTVKIVDELVKVMGRHKPENIVIEMARENQTTQKGQKNSRER | |
| | MKRIEEGIKELGSQILKEHPVENTQLQNEKLYLYYLQNGRDMYVDQELDINR | |
| | LSDYDVDHIVPQSFLKDDSIDNKVLTRSDKARGKSDNVPSEEVVKKMKNYWR | |
| | QLLNAKLITQRKFDNLTKAERGGLSELDKAGFIKRQLVETRQITKHVAQILD | |
| | SRFNTERDENDKLIREVKIITLKSKLVSDFRKDFEFYKVREINDYHHAHDAY | |
| | LNAVVGTALIKKYPKLESEFVYGDYKVYDVRKMIAKSEQEIGKATAKYFFYS | |
| | NIMNFFKTEITLANGEIRKRPLIETNEETGEIVWDKGKDFATVRKVLSMPQV | |
| | NIVKKTEVQTGGFSKESILPKRNSDKLIARKKDWDTKKYGGFDSPTVAYSVL | |
| | VVAKVEKGKSKKLKTVKELVGITIMERSSFEKDPIAFLEDKGYKEVQKDLII | |
| | KLPKYSLFELENGRKRLLASAGELQKGNELALPSHYVRFLYLAKNYEKLKGK | |
| | EEDDEKKRYYVEQHRDEFDEILEQISEFSERYILADKNLEKILELYNENEDK | |
| | DINELAENFIHLFTFTSLGAPAAFKFFDTTIDRKRYTSTKEILDATLIHQSI | |
| | TGLYETRIDLSQLGGD | |
| CasEnd-112 | MDKKYSIGLDIGTNSVGWAVITDEYKVPSKKFKVLGNTDRQSIKKNLLGALL | 72 |
| | FDSGETAEATRLKRTARRRYTRRKNRIRYLQEIFAEEMAKVDDSFFHRLEES | |
| | FLVEEDKKHERHPIFGNIVDEVAYHEKYPTIYHLRKKLADSTEKADLRLIYL | |
| | ALAHMIKFRGHFLIEGDLNSDNSDVDKLFIQLVQTYNQLFEENPINESGVDA | |
| | KAILSAKLSKSRRLENLIAQLPGEKKNGLFGNLIALSLGLTPNFKSNEDLAE | |
| | DAKLQLSKDTYDDDLENLLGQIGDQYADLFLAAKNLSDAILLSDILTVNDEI | |
| | TKAPLSASMIKRYDEHHQDLTLLKALVRQQLPEKYKEIFFDKSKNGYAGYID | |
| | GGASQEEFYKFIKPILEKMDGTEELLAKLNREDFLRKQRTFDNGSIPHQIHL | |
| | GELHAILRRQEEFYPFLKENREKIEKILTFRIPYYVGPLARGNSRFAWMTRK | |
| | SEETITPWNFEEVVDKGASAQAFIERMTNFDKNLPTEKVLPKHSLLYEYFTV | |
| | YNELTKVKYVTEGMRKPEFLSGNQKQEIVDLLFKKNRKVTVKQLKEDYFKKI | |
| | ECFDSVEISGVEDRFNASLGTYHDLLKIIKDKDFLDNEENEDILEDIVLTLT | |
| | LFEDKEMIEERLKKYANLFDDKVLKQLKRRRYTGWGRLSRKLINGIRDKQSG | |
| | KTILDFLKSDGFANRNFMQLIHDDSLTFKEDIKKAQVSGQGDSLHEQIANLA | |
| | GSPAIKKGILQTVKIVDELVKVMGRHKPENIVIEMARENQTTQKGQKNSRER | |
| | MKRLEEGIKELGSQILKEHPVENTQLQNEKLYLYYLQNGKDMYTGQELDIDR | |
| | LSDYDVDHIIPQSFIKDDSIDNKVLTSSDKARGKSDDVPSEEVVKKMKNYWR | |
| | QLLKAKLISQRKFDNLTKAERGGLSELDKAGFIKRQLVETRQITKHVAQILD | |
| | SRFNTEHDENDKLIRDVKIITLKSKLVSDFRKDFQFYKVREINDYHHAHDAY | |
| | LNAVVGTALIKKYPKLESEFVYGDYKVYDVRKMIAKSEQEIGKATAKRFFYS | |
| | NIMNFFKTEITLANGEIRKRPLIETNEETGEIVWDKEKDFATVRKVLSMPQV | |
| | NIVKKTEVQTGGFSKESILPKRNSDKLIARKKDWDPKKYGGFDSPTVAYSVL | |
| | VVAKVEKGKSKKLKSVKELVGITIMERSSFEKDPVDFLEAKGYKEVQKDLII | |
| | KLPKYSLFELENGRKRMLASAGELQKGNELALPSKYVTFLYLASHYEKLKGS | |
| | PEDNEQKQLFVEQHKDYFDEILEQISEFSKRYILADKNLEKILSLYNENEDK | |
| | SIEEQAENFINLFTLTNLGAPAAFKFFGTTIDRKRYTSTKEILDSTLIHQSI | |
| | TGLYETRIDLSQLGGD | |
| CasEnd-113 | MDKKYSIGLDIGTNSVGWAVITDEYKVPSKKFKVLGNTDRHSIKKNLIGALL | 73 |
| | FDSGETAEATRLKRTARRRYTRRKNRIRYLQEIFSNEMAKVDDSFFHRLEES | |
| | FLVEEDKKHERHPIFGNIVDEVAYHEKYPTIYHLRKKLADSDEKADLRLIYL | |
| | ALAHMIKFRGHFLIEGDLNSDNSDVQKLFIQLVQTYNQLFEENPINESGVDA | |
| | KAILSARLSKSRRLENLIAQFPGEKKNGLFGNLIALSLGLTPNFKSNFDLAE | |
| | DAKLQLSKDTYDEDLENLLAQIGDQYADLFLAAKNLSDAILLSDILTVNDEI | |
| | TKAPLSASMVKRYDEHHQDLTLLKALVRQQLPEKYKEIFFDQSKNGYAGYID | |
| | GGASQEEFYKYIKPILEKMDGSEEFLAKINREDFLRKQRTFDNGSIPHQIHL | |
| | GELHAILRRQEKYYPFLKDNREKIEKILTFRIPYYVGPLARGNSRFAWMTRK | |
| | SEETITPWNFEEVVDKEASAQKFIERMTNFDKNLPNEKVLPKHSLLYEYFTV | |
| | YNELTKVKYVTEGMRKPEFLSGEQKQEIVDLLFKKNRKVTVKQLKEDYFKKI | |
| | ECFDSVEISGVEDRFNASLGTYHDLLKIIKDKDFLDNEENEDILEDIVLTLT | |
| | LFEDREMIEERLKKYANLFDDKVLKQLKRRRYTGWGRLSRKLINGIRDKQSG | |
| | KTILDFLKSDGFANRNFMQLIHDDSLTFKEEIEKAQVSGQGDSLHEQIANLA | |
| | GSPAIKKGILQTIKIVDELVKVMGRHKPENIVIEMARENQTTQKGQKNSRER | |
| | MKRIEEGIKELGSQILKEHPVENTQLQNEKLYLYYLQNGRDMYVDQELDINR | |
| | LSDYDVDHIVPQSFLKDDSIDNKVLTRSDKARGKSDNVPSEEVVKKMKNYWR | |
| | QLLNAKLITQRKFDNLTKAERGGLSELDKAGFIKRQLVETRQITKHVAQILD | |
| | SRFNTKYDENDKLIRDVKIITLKSKLVSDFRKDFQFYKVREINNYHHAHDAY | |
| | LNAVVGTALIKKYPKLESEFVYGDYKVYDVRKMIAKSEQEIGKATAKYFFYS | |
| | NIMNFFKTEITLANGEIRKRPLIETNEETGEIVWDKEKDFATVRKVLSMPQV | |
| | NIVKKTEVQTGGFSKESILPKRNSDKLIARKKDWDPKKYGGFDSPTVAYSVL | |
| | VIAKVEKGKAKKLKSVKELVGITIMERSSFEKNPIDFLEAKGYKEIKKDLII | |
| | KLPKYSLFELENGRKRMLASAGELQKGNELALPSKYVTFLYLASHYEKLKGS | |
| | EEDNEQKQLFVEQHKHYFDEIIEQISEFSKRYILADANLEKILSLYNKNRDK | |
| | SIEEQAENFIHLFTFTNLGAPAAFKFFDTTIDRKRYTSTKEILDATLIHQSI | |
| | TGLYETRIDLSQLGGD | |
| CasEnd-114 | MDKKYSIGLDIGTNSVGWAVITDEYKVPSKKFKVLGNTDRHSIKKNLIGALL | 74 |
| | FDSGETAEATRLKRTARRRYTRRKNRICYLQEIFSNEMAKVDDSFFHRLEES | |
| | FLVEEDKRNERHPIFGNIVDEVAYHEKYPTIYHLRKKLADSDEKADLRLIYL | |
| | ALAHMIKFRGHFLIEGDLNSENSDVQKLFIQLVQTYNQTFEESPLNEETVDA | |
| | KAILTARLSKSRRLENLIAQFPGEKKNGLFGNLIALSLGLTPNFKSNFDLAE | |
| | DAKLQFSKDTYDEDLENLLGQIGDEYADLFLAAKNLYDAILLSGILTVNDEI | |
| | TKAPLSASMVKRYDEHQQDLKLLKKLVREQLPEKYKEIFSDKSKNGYAGYID | |
| | GGTSQEEFYKYIKPILEKMDGSEEFLEKINREDFLRKQRTFDNGSIPHQIHL | |
| | GELHAILRRQEKYYPFLKENREKIEKILTFRIPYYVGPLARGNSRFAWMTRK | |
| | SDEKITPWNFEEVVDKEASAQKFIERMTNNDTYLPDEKVLPKHSLLYEKFTV | |
| | YNELTKVKYVTEGMRKPEFLSAEQKQEIVDLLFKKNRKVTVKKLKEYLFKKI | |
| | ECFDSVEISGLEDRFNASLGTYHDLLKIIKDKDFLDNEENEDILEDIVLTLT | |
| | LFEDREMIEERLKKYADLFDKKVLKKLKRRHYTGWGRLSKKLINGIRDKQSG | |
| | KTILDFLIDDGFANRNFMQLIHDDSLTFKEEIKKAQVIGQGDSLHEHIANLA | |
| | GSPAIKKGILQTVKVVDELVKVMGRHKPENIVIEMARENQTTQKGQRNSRQR | |
| | LKRLEEAIKELGSNILKEHPVENSQLQNDRLYLYYLQNGKDMYTGEELDIDR | |
| | LSDYDIDHIIPQSFIKDDSIDNRVLVSSAKARGKSDNVPSEEVVKKMKNYWR | |
| | QLLEAKLISQRKFDNLTKAERGGLSELDKAGFIKRQLVETRQITKHVAQILD | |
| | SRMNTKYDENDKLIREVKVITLKSKLVSDFRKDFQFYKVREINNYHHAHDAY | |
| | LNAVVGTALIKKYPKLESEFVYGDYKVYDVRKMIAKSEQEIGKATAKYFFYS | |
| | NIMNFFKTEITLANGEIRKRPLIETNGETGEIVWDKGRDFATVRKVLSMPQV | |
| | NIVKKTEVQTGGFSKESILPKRNSDKLIARKKDWDPKKYGGFDSPTVAYSVL | |
| | VVAKVEKGKSKKLKSVKELLGITIMERSSFEKNPIDFLEAKGYKEVKKDLII | |
| | KLPKYSLFELENGRKRMLASAGELQKGNELALPSKYVNFLYLASHYEKLKGS | |
| | PEDNEQKQLFVEQHKHYLDEIIEQISEFSKRVILADANLDKVLSAYNKHRDK | |
| | PIREQAENIIHLFTLTNLGAPAAFKYFDTTIDRKRYTSTKEVLDATLIHQSI | |
| | TGLYETRIDLSQLGGD | |
| CasEnd-115 | MDKKYSIGLDIGTNSVGWAVITDEYKVPSKKFKVLGNTDRHSIKKNLIGALL | 75 |
| | FDSGETAEATRLKRTARRRYTRRKNRIRYLQEIFANEMAKVDDSFFHRLEES | |
| | FLVEEDKKNERHPIFGNIVDEVAYHEKYPTIYHLRKKLVDSDEKADLRLIYL | |
| | ALAHMIKFRGHFLIEGDLNSDNSDVDKLFIQLVQTYNQLFEENPIEAEGVDA | |
| | KAILSERLSKSRRLENLIAQLPGEKKNGLFGNLIALSLGLTPNFKSNFDLAE | |
| | DAKLQLSKDTYDDDLENLLGQIGDQYADLFLAAKNLSDAILLSDILRVNTEI | |
| | TKAPLSASMIKRYDEHHQDLTLLKALVRQQLPEKYKEIFFDQSKNGYAGYID | |
| | GGASQEEFYKYIKPILEKMDGTEELLAKLDREDLLRKQRTEDNGSIPHQIHL | |
| | GELHAILRRQEKYYPFLKENREKIEKILTFRIPYYVGPLARGNSRFAWMTRK | |
| | SDETITPWNFEEVVDKGASAEAFIERMTNFDKNLPNEKVLPKHSLLYEYFTV | |
| | YNELTKVKYVTEGMRKPEFLDGEQKKEIVDLLFKKNRKVTVKQLKEDYFKEF | |
| | ECFDSVEISGVEDRFNASLGTYHDLLKIIKDKDFLDNEENEDILEDIVLTLT | |
| | LFEDREMIKERLKKYANLFDDKVMKQLKRRRYTGWGRLSRKLINGIRDKQSG | |
| | KTILDFLKSDGFANRNFMQLIHDDSLTFKDEIEKAQVSGQGESLHEHIANLA | |
| | GSPAIKKGILQTVKVVDELVKVMGRHKPENIVIEMARENQTTQKGQKNSRER | |
| | MKRIEEGIKELGSQILKEHPVENTQLQNEKLYLYYLQNGRDMYVDQELDINR | |
| | LSDYDVDHIVPQSFLKDDSIDNKVLTRSDKARGKSDNVPSEEVVKKMKNYWR | |
| | QLLNAKLITQRKFDNLTKAERGGLSELDKAGFIKRQLVETRQITKHVAQILD | |
| | SRMNTKYDDNDKLIRDVKVITLKSKLVSDFRKDFQFYKVREINNYHHAHDAY | |
| | LNAVVGTALIKKYPKLESEFVYGDYKVYDVRKMIAKSEQEIGKATAKYFFYS | |
| | NIMNFFKTEITLANGEIRKRPLIEVNEETGEIVWDKEKDFATVRKVLSMPQV | |
| | NIVKKTEVQTGGFSKESILPKRNSDKLIARKKDWDPKKYGGFDSPTVAYSVL | |
| | VVAKVEKGKAKKLKTVKELLGITIMERSAFEKDPVAFLEAKGYKEVKKDLII | |
| | KLPKYSLFELENGRKRMLASAGELQKGNELALPSKYVNFLYLASHYEKLKGS | |
| | EEDNKQKQLFVEQHKEYLDEIIDQISEFSKRVILADANLEKVKSAYEKHRDK | |
| | SIEEQAENIIHLFTLTNLGAPAAFKYFDTTIDRKRYTSTKEVLNATLIHQSI | |
| | TGLYETRIDLSQLGGD | |
| CasEnd-116 | MDKKYSIGLDIGTNSVGWAVITDEYKVPSKKFKVLGNTDRHSIKKNLIGALL | 76 |
| | FDSGETAEATRLKRTARRRYTRRKNRIRYLQEIFSEEMAKVDDSFFHRLEES | |
| | FLVEEDKRHERHPIFGNIVDEVAYHEKYPTIYHLRKKLADSDEKADLRLIYL | |
| | ALAHMIKFRGHFLIEGDLNSDNSDVQKLFIQLVQTYNQLFEENPINEEGVDA | |
| | KAILTARLSKSRRLENLIAQFPGEKKNGLFGNLIALSLGLTPNFKSNFDLAE | |
| | DAKLQLSKDTYDDDLENLLAQIGDQYADLFLAAKNLSDAILLSGILTVNDEI | |
| | TKAPLSASMVKRYDEHHQDLTLLKALVRQQLPEKYKEIFFDQSKNGYAGYID | |
| | GGASQEEFYKYLKPILEKLDGSEEFLDKIEREDFLRKQRTFDNGSIPHQIHL | |
| | GELHAILRRQEKYYPFLKENREKIEKILTFRIPYYVGPLARGNSRFAWMTRK | |
| | SEETITPWNFEEVVDKEASAQAFIERMTNFDKNLPEEKVLPKHSLLYEKFTV | |
| | YNELTKVKYVTEGMRKPEFLSAEQKQEIVDLLFKKNRKVTVKQLKEYYFKKI | |
| | ECFDSVEISGVEDRFNASLGTYHDLLKIIKDKDFLDNEENEDILEDIVLTLT | |
| | LFEDREMIEKRLKKYAHLFDDKVLKKLKRRRYTGWGRLSKKLINGIRDKQSG | |
| | KTILDFLISDGFANRNFMQLIHDDSLTFKEEIEKAQVIGQGDSLHELIANLA | |
| | GSPAIKKGILQTIKIVDELVKVMGRHEPENIVIEMARENQTTQKGQKNSRER | |
| | MKRLEEGIKELGSDILKEHPVENTQLQNEKLYLYYLQNGKDMYTGEELDIDR | |
| | LSDYDVDHIVPQSFLKDDSIDNKVLVSSEKARGKSDNVPSEEVVKKMKNYWK | |
| | QLLEAKLITQRKFDNLTKAERGGLTELDKAGFIKRQLVETRQITKHVAQILD | |
| | SRFNTKYDENDKLIRDVKIITLKSKLVSDFRKDFQFYKVREINNYHHAHDAY | |
| | LNAVVGTALIKKYPKLESEFVYGDYKVYDVRKMIAKSEQEIGKATAKYFFYS | |
| | NIMNFFKSEITLANGEIRKRPLIETNEETGEIVWDKGKDFATVRKVLSMPQV | |
| | NIVKKTEVQTGGFSKESILPKRNSDKLIARKKDWDPKKYGGFDSPTVAYSVL | |
| | VVAKVEKGKAKKLKTVKELVGITIMERSSFEKNPIAFLEAKGYKNVQKDLII | |
| | KLPKYSLFELENGRKRMLASAGELQKGNELALPNKYVTLLYLASHYEKLKGS | |
| | PEDNEQKQLFVEQHKEYFDEIIEQISEFSKRYILADANLEKIKSLYEKNRDK | |
| | SIEEQAENFINLLTFTALGAPAAFKFFDTTIDRKRYTSTKEILNATLIHQSI | |
| | TGLYETRIDLSQLGGD | |
| CasEnd-117 | MDKKYSIGLDIGTNSVGWAVITDEYKVPSKKFKVLGNTDRHSIKKNLIGALL | 77 |
| | FDSGETAEATRLKRTARRRYTRRKNRICYLQEIFSNEMAKVDDSFFHRLEES | |
| | FLVEEDKKNERHPIFGNIVDEVAYHEKYPTIYHLRKKLADSDEKADLRLIYL | |
| | ALAHMIKFRGHFLIEGDLNSDNSDVDKLFIQLVQTYNQLFEENPINEEGVDA | |
| | KAILSARLSKSRRLENLIAQFPGEKKNGLFGNLIALSLGLTPNFKSNEDLAE | |
| | DAKLQLSKDTYDEDLENLLGQIGDQYADLFLAAKNLSDAILLSDILTVNDEI | |
| | TKAPLSASMVKRYDEHHQDLTLLKALVRQQLPEKYKEIFFDQSKNGYAGYID | |
| | GGASQEEFYKYIKPILEKMDGSEEFLDKLEREDFLRKQRTFDNGSIPHQIHL | |
| | GELHAILRRQEKYYPFLKDNREKIEKILTFRIPYYVGPLARGNSRFAWMTRK | |
| | SDETITPWNFEEVVDKEASAQKFIERMTNFDKNLPNEKVLPKHSLLYEYFTV | |
| | YNELTKVKYVTEGMRKPEFLSGEQKQEIVDLLFKKNRKVTVKQLKEDYFKKF | |
| | ECFDSVEISGVEDRFNASLGTYHDLLKIIKDKDFLDNEENEDILEDIVLTLT | |
| | LFEDREMIEERLKKYADLFDKKVLKQLKRRRYTGWGRLSKKLINGIRDKQSG | |
| | KTILDFLKSDGFANRNFMQLIHDDSLTFKEEIQKAQVSGKGDSLHEHIANLA | |
| | GSPAIKKGILQTVKVVDELVKVMGRHKPENIVIEMARENQTTQKGQKNSRER | |
| | MKRIEEGIKELGSQILKEHPVENTQLQNEKLYLYYLQNGRDMYVDQELDINR | |
| | LSDYDVDHIVPQSFLKDDSIDNKVLTRSDKARGKSDNVPSEEVVKKMKNYWR | |
| | QLLNAKLITQRKFDNLTKAERGGLSELDKAGFIKRQLVETRQITKHVAQILD | |
| | SRMNTKYDENDKLIREVKVITLKSKLVSDFRKDFQFYKVREINNYHHAHDAY | |
| | LNAVVGTALIKKYPKLESEFVYGDYKVYDVRKMIAKSEQEIGKATAKYFFYS | |
| | NIMNFFKTEITLANGEIRKRPLIETNGETGEIVWDKGRDFATVRKVLSMPQV | |
| | NIVKKTEVQTGGFSKESILPKRNSDKLIARKKDWDTKKYGGFDSPTVAYSVL | |
| | VIAKVEKGKAKKLKTVKELVGITIMERSSFEKNPIDFLEAKGYKEIKKDLII | |
| | KLPKYSLFELENGRKRLLASAGELQKGNELALPNKYVTFLYLASHYEKLKGS | |
| | PEDNEQKQLFVEQHKHYFDEIIEQISEFSKRVILADANLEKILSLYNKNRDK | |
| | SIEEQAENIIHLFTFTNLGAPAAFKFEDTTIDRKRYTSTKEILDATLIHQSI | |
| | TGLYETRIDLSQLGGD | |
| CasEnd-118 | MKKKYSIGLDIGTNSVGWAVITDEYKVPSKKFKVLGNTDRQSIKKNLIGALL | 78 |
| | FDSGETAEATRLKRTARRRYTRRKNRIRYLQEIFAEEMAKVDDSFFHRLEES | |
| | FLVEEDKKHERHPIFGNIVDEVAYHEKYPTIYHLRKKLVDSTEKADLRLIYL | |
| | ALAHMIKFRGHFLIEGDLNSENSDVQKLFIQLVQTYNQLFEENPLNESGVDA | |
| | KAILSAKLSKSRRLENLIAQLPGEKKNGLFGNLIALSLGLTPNFKSNEDLSE | |
| | DAKLQLSKDTYDDDLDNLLGQIGDQYADLFLAAKNLSDAILLSDILRVNTEI | |
| | TKAPLSASMIKRYDEHHQDLTLLKALVRQQLPEKYKEIFFDESKNGYAGYID | |
| | GGASQEEFYKFIKPILEKMDGTEELLAKLNREDLLRKQRTFDNGSIPHQIHL | |
| | GELHAILRRQEEFYPFLKENREKIEKILTFRIPYYVGPLARGNSRFAWMTRK | |
| | SEETITPWNFEEVVDKGASAQSFIERMTNFDKNLPNEKVLPKHSLLYEYFTV | |
| | YNELTKVKYVTEGMGKPEFLSGEQKKEIVDLLFKKNRKVTVKQLKEFYFKEI | |
| | ECFDSVEISGVEDRFNASLGTYHDLLKIIKDKDFLDNEENEDILEDIVLTLT | |
| | LFEDREMIEERLKKYANLFDDKVMKQLKRRRYTGWGRLSRKLINGIRDKQSG | |
| | KTILDFLKSDGFANRNFMQLIHDDSLTFKEEIKKAQVKGQGDSLHEQIANLA | |
| | GSPAIKKGILQTVKVVDELVKVMGRHKPENIVIEMARENQTTQKGQKNSRER | |
| | MKRIEEGIKELGSQILKEHPVENTQLQNEKLYLYYLQNGRDMYTGQELDINR | |
| | LSDYDVDHIVPQSFLKDDSIDNKVLTRSEKARGKSDNVPSEEVVKKMKSYWR | |
| | QLLKAKLITQRKFDNLTKAERGGLSELDKAGFIKRQLVETRQITKHVAQILD | |
| | SRMNTKRDENDKLIRDVKVITLKSKLVSDFRKDFQFYKVREINNYHHAHDAY | |
| | LNAVVGTALIKKYPKLESEFVYGDYKVYDVRKMIAKSEQEIGKATAKYFFYS | |
| | NIMNFFKTEIKLANGEIRKRPLIETNEETGEIVWDKERDFATVRKVLSMPQV | |
| | NIVKKTEVQTGGFSKESILPKRESDKLIARKKDWDPKKYGGFDSPTVAYSVL | |
| | VVAKVEKGKSKKLKTVKELLGITIMERSSFEKDPVAFLEAKGYKDVKKDLII | |
| | KLPKYSLFELENGRKRMLASAGELQKGNELALPSKYVNFLYLASHYEKLKGK | |
| | PEDEEQKQLFVEQHKHYLDEIIEQISEFSERVILADKNLEKVLSAYSKHRDK | |
| | SISEQAENIIHLFTLTNLGAPAAFKYFDTTIDRKRYTSTKEVLNATLIHQSI | |
| | TGLYETRIDLSQLGGD | |
| CasEnd-119 | MDKKYSIGLDIGTNSVGWAVITDEYKVPSKKFKVLGNTDRHSIKKNLIGALL | 79 |
| | FDSGETAEATRLKRTARRRYTRRKNRICYLQEIFSNEMAKVDDSFFHRLEES | |
| | FLVEEDKKHERHPIFGNIVDEVAYHEKYPTIYHLRKKLADSTEKADLRLIYL | |
| | ALAHIIKFRGHFLIEGDLNSENSDVQKLFIQLVQTYNQLFEENPINEEGVDA | |
| | KAILSAKLSKSRRLENLIAQLPGEKKNGLFGNLIALSLGLTPNFKSNEDLAE | |
| | DAKLQLSKDTYDEDLENLLAQIGDQYADLFLAAKNLSDAILLSDILTVNSEI | |
| | TKAPLSASMIKRYDEHHQDLTLLKALVRQQLPEKYKEIFFDESKNGYAGYID | |
| | GGASQEEFYKYIKPILEKMDGTEELLEKINREDFLRKQRTFDNGSIPHQIHL | |
| | GELHAILRRQEDYYPFLKENREKIEKILTFRIPYYVGPLARGNSRFAWMTRK | |
| | SEETITPWNFEEVVDKEASAQAFIERMTNFDKNLPTEKVLPKHSLLYEKFTV | |
| | YNELTKVKYVTEGMGKPEFLSAEQKQEIVDLLFKKNRKVTVKQLKEDYFKEI | |
| | ECFDSVEISGVEDRFNASLGTYHDLLKIIKDKEFLDNEENEDILEDIVLTLT | |
| | LFEDREMIEERLKKYADLFDKKVLKQLKRRRYTGWGRLSKKLINGIRDKQSG | |
| | KTILDFLKSDGFANRNFMQLIHDDSLTFKEEIKKAQVSGQGDSLHEHIANLA | |
| | GSPAIKKGILQTVKVVDELVKVMGRHKPENIVIEMARENQTTQKGQKNSRER | |
| | MKRLEEGIKELGSQILKEHPVENTQLQNDKLYLYYLQNGKDMYTGEELDIDR | |
| | LSDYDVDHIIPQSFIKDDSIDNKVLTSSEKARGKSDNVPSEEVVKKMKNYWR | |
| | QLLNAKLISQRKFDNLTKAERGGLSELDKAGFIKRQLVETRQITKHVAQILD | |
| | SRMNTKYDENDKLIREVKVITLKSKLVSDFRKDFQFYKVREINNYHHAHDAY | |
| | LNAVVGTALIKKYPKLESEFVYGDYKVYDVRKMIAKSEQEIGKATAKYFFYS | |
| | NIMNFFKTEITLANGEIRKRPLIETNGETGEIVWDKGRDFATVRKVLSMPQV | |
| | NIVKKTEVQTGGFSKESILPKRNSDKLIARKKDWDTKKYGGFDSPTVAYSVL | |
| | VVAKVEKGKAKKLKTVKELVGITIMERSSFEKNPIAFLEAKGYKNIQEDLII | |
| | KLPKYSLFELENGRKRLLASAGELQKGNELALPNKYVTLLYHASHYEKLKGS | |
| | PEDEEKKLLYVEQHRSYFDEILEQISEFSKRYILADKNLEKILELYNKFRDK | |
| | SIEEQAESFINLFTFTALGAPAAFKFFDTTIDRKRYTSTKEILNSTLIHQSI | |
| | TGLYETRIDLSQLGGD | |
| CasEnd-120 | MKKSYSIGLDIGTNSVGWAVITDEYKVPSKKFKVLGNTDRKSIKKNLLGALL | 80 |
| | FDSGETAEATRLKRTARRRYTRRKNRIRYLQEIFSEEMAKVDDSFFHRLEES | |
| | FLVEEDKKHERHPIFGNIVDEVAYHEKYPTIYHLRKKLADSDEKADLRLIYL | |
| | ALAHIIKFRGHFLIEGDLNSDNSDVQKLFIQLVQTYNQLFEESVINEIGVDA | |
| | KAILSARLSKSRRLENLIAQFPGEKRNGLFGNLIALSLGLTPNFKSNEDLAE | |
| | DAKLQFSKDTYDEDLDNLLAQIGDQYADLFLAAKNLSDAILLSGILTVNSES | |
| | TKAPLSASMIKRYDEHHQDLTLLKALVREQLPEKYKEIFFDQSKNGYAGYID | |
| | GGASQEEFYKYIKPILEKMDGTEELLAKLNREDFLRKQRTFDNGSIPHQIHL | |
| | GELHAILRRQEDFYPFLKENREKIEKILTFRIPYYVGPLARGNSRFAWMTRK | |
| | SDETITPWNFEEVVDKGASAQAFIERMTNFDKNLPNEKVLPKHSLLYEYFTV | |
| | YNELTKVKYITEGMRKPEFLSGEQKKAIVDLLFKKNRKVTVKQLKEDYFKKI | |
| | ECFDSVEISGVEDRFNASLGTYHDLLKIIKDKDFLDNEENEDILEDIILTLT | |
| | LFEDREMIEERLKKYAHLFDKKVLKQLKRRRYTGWGRLSGKLINGIRDKQSG | |
| | KTILDFLKSDGFANRNFMQLIHDDSLTFKEIIQKAQVSGQGDSLHEHIANLA | |
| | GSPAIKKGILQSIKIVDELVKVMGRHDPENIVIEMARENQTTQKGQKNSRER | |
| | MKRIEEGIKELGSQILKEHPVENTQLQNEKLYLYYLQNGRDMYVDQELDINR | |
| | LSDYDVDHIVPQSFLKDDSIDNKVLTRSDKARGKSDNVPSEEVVKKMKNYWR | |
| | QLLNAKLITQRKFDNLTKAERGGLSELDKAGFIKRQLVETRQITKHVAQILD | |
| | SRFNTERDENDKLIREVKIVTLKSKLVSDFRKDFGFYKVREINDYHHAHDAY | |
| | LNAVVGTALIKKYPKLESEFVYGDYKVYDVRKMIAKSEQEIGKATAKYFFYS | |
| | NIMNFFKTEITLANGEVRKRPMIETNEETGEIVWDKTKDFATVRKVLSMPQV | |
| | NIVKKTEVQTGGFSKESILPKRNSDKLIARKKDWDTKKYGGFDSPTVAYSVL | |
| | VVADVEKGKAKKLKTVKELVGITIMERSSFEKNPVAFLETKGYQNVQKDLII | |
| | KLPKYSLFELENGRKRLLASAGELQKGNELALPQKYVTLLYHASHYEKLKGK | |
| | SEDEEHKLEYVKQHRDEFDEILDQIEEFSKRYILADKNLEKIKELYAENRDS | |
| | SINELAENFIHLFTFTSLGAPAAFKFFDKTIDRKRYTSTTEILNATLIHQSI | |
| | TGLYETRIDLSQLGGD | |
| CasEnd-121 | MKKKYSIGLDIGTNSVGWAVITDEYKVPSKKFKVLGNTDRQSIKKNLIGALL | 81 |
| | FDSGETAEATRLKRTARRRYTRRKNRIRYLQEIFAEEMNKVDDSFFHRLEES | |
| | FLVEEDKRNERHPIFGNIVDEVAYHEKYPTIYHLRKKLADSTEKADLRLIYL | |
| | ALAHIIKFRGHFLIEGDLNSDNSDVQKLFIQLVQTYNQLFEENPLNEEGVDA | |
| | KAILSAKLSKSRRLENLIALFPTEKKNGLFGNLIALSLGLTPNFKSNFDLSE | |
| | DAKLQLSKDTYDEDLENLLAQIGDQYADLFLAAKNLSDAILLSGILTVNDEI | |
| | TKAPLSASMIKRYDEHHQDLTLLKALVRQQLPEKYKEIFFDQSKNGYAGYID | |
| | GGASQEDFYKYIKPILEKMDGTEEFLEKINREDFLRKQRTFDNGSIPHQIHL | |
| | GELHAILRRQEEYYPFLKENQEKIEKILTFRIPYYVGPLARGNSRFAWMTRK | |
| | SDETITPWNFEEVVDKEASAQAFIERMTNFDKNLPTEKVLPKHSLLYEKFTV | |
| | YNELTKVKYVTEGMGKPEFLSAEQKQEIVDLLFKKNRKVTVKQLKEDYFKKI | |
| | ECFDSVEISGVEDRFNASLGTYHDLLKIIKDKDFLDNEENEDILEDIVLTLT | |
| | LFEDREMIEERLKKYAHLFDKKVLKQLKRRRYTGWGRLSKKLINGIRDKQSG | |
| | KTILDFLISDGFANRNFMQLIHDDSLTFKEEIKKAQEIGQGDSLHEQIANLA | |
| | GSPAIKKGILQTVKIVDEIVKVMGRHKPENIVIEMARENQTTQKGQKNSRER | |
| | LKRIEEGLKELGSQILKEHPVENTQLQNDKLYLYYLQNGKDMYTGEELDIDR | |
| | LSDYDVDHIIPQSFIKDDSIDNKVLTSSDKARGKSDDVPSEEVVKKMKNYWR | |
| | QLLNAKLISQRKFDNLTKAERGGLSELDKAGFIKRQLVETRQITKHVAQILD | |
| | SRFNTERDENDKLIRDVKIITLKSKLVSDFRKDFGFYKVREINDYHHAHDAY | |
| | LNAVVGTALIKKYPKLESEFVYGDYKVYDVRKMIAKSEQEIGKATAKRFFYS | |
| | NIMNFFKTDIKLANGEIRKRPLIETNEETGEIVWDKEKDFATVRKVLSMPQV | |
| | NIVKKTEVQTGGFSKESILPKRDSDKLIARKKDWDTKKYGGFDSPTVAYSVL | |
| | VVAKVEKGKTKKLKTVKELVGITIMERSRFEKDPVAFLEAKGYQEIQEDLII | |
| | KLPKYSLFELENGRKRLLASAGELQKGNELALPSKYVTFLYLASHYEKLKGS | |
| | PEDNEKKLEYVEQHRYYFDEIFEQISEFSKRYILADKNLEKILELYNQHRDA | |
| | PIEELAESFINLFTFTALGAPAAFKFFGTTIDRKRYTSTKEILNSTLIHQSI | |
| | TGLYETRIDLSQLGGD | |
| CasEnd-122 | MDKKYSIGLDIGTNSVGWAVITDEYKVPSKKFKVLGNTDRQSIKKNLIGALL | 82 |
| | FDSGETAEATRLKRTARRRYTRRKNRIRYLQEIFAEEMAKVDDSFFHRLEES | |
| | FLVEEDKKHERHPIFGNIVDEVAYHEKYPTIYHLRKKLADSTEKADLRLIYL | |
| | ALAHIIKFRGHFLIEGDLNSENSDVDKLFIQLVQTYNQLFEENPINESGVDA | |
| | KAILSAKLSKSRRLENLIAQLPGEKRNGLFGNLIALSLGLTPNFKSNFDLAE | |
| | DAKLQLSKDTYDEDLDNLLAQIGDQYADLFLAAKNLSDAILLSDILTVNSEI | |
| | TKAPLSASMIKRYDEHHQDLTLLKALVREQLPEKYKEIFFDQSKNGYAGYID | |
| | GGASQEEFYKYIKPILEKMDGTEELLAKLNREDLLRKQRTFDNGSIPHQIHL | |
| | GELHAILRRQEDFYPFLKENREKIEKILTFRIPYYVGPLARGNSRFAWMTRK | |
| | SEETITPWNFEEVVDKGASAQAFIERMTNFDKNLPTEKVLPKHSLLYEYFTV | |
| | YNELTKVKYVTEGMRKPEFLSGEQKKEIVDLLFKKNRKVTVKQLKEDYFKKI | |
| | ECFDSVEISGVEDRFNASLGTYHDLLKIIKDKDELDNEENEDILEDIVLTLT | |
| | LFEDREMIEERLKKYAHLFDKKVLKQLKRRRYTGWGRLSRKLINGIRDKQSG | |
| | KTILDFLKSDGFANRNFMQLIHDDSLTFKEAIQKAQVSGQGDSLHEQIANLA | |
| | GSPAIKKGILQTIKIVDELVKVMGRHKPENIVIEMARENQTTQKGQKNSRER | |
| | MKRLEEGIKELGSQILKEHPVENTQLQNEKLYLYYLQNGKDMYTGQELDIDR | |
| | LSDYDVDHIIPQSFIKDDSIDNKVLTSSDKARGKSDNVPSEEVVKKMKNYWR | |
| | QLLNAKLISQRKFDNLTKAERGGLSELDKAGFIKRQLVETRQITKHVAQILD | |
| | SRMNTKYDENDKLIRDVKIITLKSKLVSDFRKDFQFYKVREINNYHHAHDAY | |
| | LNAVVGTALIKKYPKLESEFVYGDYKVYDVRKMIAKSEQEIGKATAKRFFYS | |
| | NIMNFFKTEITLANGEIRKRPLIETNEETGEIVWDKEKDFATVRKVLSMPQV | |
| | NIVKKTEVQTGGFSKESILPKRNSDKLIARKKDWDPKKYGGFDSPTVAYSVL | |
| | VVAKVEKGKSKKLKTVKELVGITIMERSSFEKDPVDFLEAKGYKEVQKDLII | |
| | KLPKYSLFELENGRKRMLASAGELQKGNELALPSKYVTFLYLASHYEKLKGS | |
| | PEDEEKKQLYVEQHKHYFDEILEQISEFSKRYILADANLEKILSLYNQFEDK | |
| | PIEEQAESFINLFTLTALGAPAAFKFFDTTIDRKRYTSTKEILDSTLIHQSI | |
| | TGLYETRIDLSQLGGD | |
| CasEnd-123 | MKKKYSIGLDIGTNSVGWAVITDEYKVPSKKFKVLGNTDRQSIKKNLIGALL | 83 |
| | FDSGETAEATRLKRTARRRYTRRKNRIRYLQEIFSEEMSKVDDSFFHRLEES | |
| | FLVEEDKRHERHPIFGNIVDEVAYHEKYPTIYHLRKKLADSTQKADLRLIYL | |
| | ALAHIIKFRGHFLIEGDLNPENSDVQKLFIQLVQTYNQLFEENILNESRVDA | |
| | KAILSARLSKSRRLENLIAQLPGEKKNGLFGNLIALSLGLTPNFKSNFDLSE | |
| | DAKLQLSKDTYDEDLDNLLAQIGDEYADLFLAAKNLSDAILLSGILTVNDES | |
| | TKAPLSASMIKRYDEHHQDLTLLKALVRQQLPEKYKEIFFDQSKNGYAGYID | |
| | GGASQEEFYKYIKPILEKMDGTEYLLAKINREDFLRKQRTFDNGSIPHQIHL | |
| | GELHAILRRQEDFYPFLKENREKIEKILTFRIPYYVGPLARGNSRFAWLTRK | |
| | SEETITPWNFEEVVDKEASAQAFIERMTNFDKNLPNEKVLPKHSLLYEMFTV | |
| | YNELTKVKYVTEGMRKPEFLSSGQKEEIVDLLFKKNRKVTVKQLKEFYFKKI | |
| | ECFSSVEISGVEDRFNASLGTYHDLLKIIKDKDELDNEENEDILEDIVLTLT | |
| | LFEDREMIEERLKKYAHLFDKKVLKKLKRRRYTGWGRLSRKLINGIRDKQSG | |
| | KTILDFLKDDGFANRNFMQLIHDDSLTFKEDIQKAQVKGEGESLHEQIANLA | |
| | GSPAIKKGILQSIKIVDELVKVMGRHAPENIVIEMARENQTTQKGQKNSRER | |
| | MKRIEEGIKELGSQILKEHPVENTQLQNEKLYLYYLQNGRDMYVDQELDINR | |
| | LSDYDVDHIVPQSFLKDDSIDNKVLTRSDKARGKSDNVPSEEVVKKMKNYWR | |
| | QLLNAKLITQRKFDNLTKAERGGLSELDKAGFIKRQLVETRQITKHVAQILD | |
| | SRFNTEYDENDKLIREVKIITLKSKLVSDFRKDFQFYKVREINNYHHAHDAY | |
| | LNAVVGTALIKKYPKLESEFVYGDYKVYDVRKMIAKSDQEIGKATAKYFFYS | |
| | NIMNFFKTEITLANGEVRKRPLIETNEETGEIVWDKTKDFATVRKVLSMPQV | |
| | NIVKKTEVQTGGFSKESILPKRNSDKLIARKKDWDPKKYGGFDSPTVAYSVL | |
| | VVAKVEKGKSKKLKTVKELVGITIMERSSFEKDPVAFLESKGYKNIQKDLII | |
| | KLPKYSLFELENGRKRLLASAGELQKGNELALPQHYVTLLYLASRYEKLKGK | |
| | PEDNEKKRNYVDQHRQEFDEILDQISEFSKRYILADANLDKILSLYNENRDA | |
| | SISELAENFIHLFTFTSLGAPAAFKFFDSDIDRKRYTSTKEVLNATLIHQSI | |
| | TGLYETRIDLSKLGGD | |
| CasEnd-124 | MDKKYSIGLDIGTNSVGWAVITDEYKVPSKKFKVLGNTDRHSIKKNLIGALL | 84 |
| | FDSGETAEATRLKRTARRRYTRRKNRIRYLQEIFSEEMAKVDDSFFHRLEES | |
| | FLVEEDKRNERHPIFGNIVDEVAYHEKYPTIYHLRKKLADSTEKADLRLIYL | |
| | ALAHIIKFRGHFLIEGDLNSENSDVQKLFIQLVQTYNNLFEENPITEEGVDA | |
| | KAILSAKLSKSRRLENLIAEFPGEKKNGLFGNLIALSLGLTPNFKSNEDLSE | |
| | DAKLQFSKDTYDEDLDNLLAQIGDQYADLFLAAKNLYDAILLSGILTVNTEI | |
| | TKAPLSASMIKRYDEHHQDLTLLKKLVREQLPEKYKEIFFDESKNGYAGYID | |
| | GGASQEEFYKYIKPILEKMDGSEYLLVKLEREDFLRKQRTFDNGSIPHQIHL | |
| | GELHAILRRQEDFYPFLKENREKIEKILTFRIPYYVGPLARGNSRFAWMTRK | |
| | SEETITPWNFEEVVDKEASAQSFIERMTNFDKNLPNEKVLPKHSLLYEYFTV | |
| | YNELTKVKYVTEGMRKPAFLSGEQKKEIVDLLFKTNRKVTVKQLKEDLFKKI | |
| | ECFDSVEISGVEDRFNASLGTYHDLLKIIKDKDFLDNEENEDILEDIILTLT | |
| | LFEDREMIEERLDKYAHLFDKKVLKKLKRRRYTGWGRLSKKLINGIRDKQSG | |
| | KTILDFLKDDGFANRNFMQLIHDDSLTFKEEIKKAQVIGQTDSLHEVIADLA | |
| | GSPAIKKGILQSIKIVDELVKVMGRHNPENIVIEMARENQTTQKGQKNSRER | |
| | MKRLEESIKELGSQILKEHPVENTQLQNDKLYLYYLQNGKDMYTGEELDIDR | |
| | LSDYDVDHIIPQSFIKDDSIDNKVLTSSDEARGKSDNVPSEEVVKKMKSYWR | |
| | QLLNAKLISQRKFDNLTKAERGGLSELDKAGFIKRQLVETRQITKHVAQILD | |
| | SRFNTKYDENDKLIREVKIITLKSKLVSDFRKDFQFYKVREINDYHHAHDAY | |
| | LNAVVGTALIKKYPKLESEFVYGDYKVYNSRKMIAKSEQEIGKATAKYFFYS | |
| | NIMNFFKSDITLANGEIRKRPLIETNEETGEIVWDKEKDFATVRKVLSMPQV | |
| | NIVKKTEVQTGGFSKESILPKRNSDKLIARKKDWDTKKYGGFDSPTVAYSVL | |
| | VVAKVEKGKSKKLKTVKELVGITIMERSSFEKDPIAFLEAKGYKNVQKDLII | |
| | KLPKYSLFELENGRKRLLASAGELQKGNELALPNKYVTLLYHAKHYEKLKGS | |
| | PEDNEQKMEYVEQHKYYFDEILEQISEFSERYILADKNLEKIKSLYKENADK | |
| | DIEELASSFINLFTFTALGAPAAFKFFDTTIDRKRYTSTTEILDATLIHQSI | |
| | TGLYETRIDLSQLGGD | |
| CasEnd-125 | MKKKYSIGLDIGTNSVGWAVITDEYKVPSKKFKVLGNTDRQSIKKNLLGALL | 85 |
| | FDSGETAEATRLKRTARRRYTRRKNRIRYLQEIFSEEMAKVDDSFFHRLEES | |
| | FLVEEDKRHERHPIFGNIVDEVAYHEKYPTIYHLRKELADSTEKADLRLIYL | |
| | ALAHMIKFRGHFLIEGDLNSENSDVQKLFIQLVQTYNQLFEENPINEETVDA | |
| | KAILSAKLSKSRRLENLIAQLPGEKKNGLFGNLIALSLGLTPNFKSNFGLSE | |
| | DAKLQLSKDTYDEDLENLLAQIGDQYADLFLAAKNLSDAILLSDILTVNDEI | |
| | TKAPLSASMIKRYDEHHQDLTLLKALVRQQLPEKYKEIFFDESKNGYAGYID | |
| | GGASQEEFYKFIKPILEKMDGAEYLLAKINREDFLRKQRTFDNGSIPHQIHL | |
| | GELHAILRRQEEFYPFLKENREKIEKILTFRIPYYVGPLARGNSRFAWMTRK | |
| | SDETITPWNFEEVVDKEASAQAFIERMTNFDKNLPNEKVLPKHSLLYEKFTV | |
| | YNELTKVKYVTEGMRKPEFLSSEQKQEIVDLLFKKNRKVTVKQLKEFYFKKI | |
| | ECFDSVEISGVEDRFNASLGTYHDLLKIIKDKAFLDNEENEDILEDIVLTLT | |
| | LFEDREMIEERLEKYANLFDDKVLKKLKRRRYTGWGRLSKKLINGIKDKQSG | |
| | KTILDFLKSDGFANRNFMQLIHDDSLTFKEEIKKAQVKGQGDSLHEQIANLA | |
| | GSPAIKKGILQSVKIVDELVKVMGRHKPENIVIEMARENQTTQKGQKNSRER | |
| | MKRLEESIKELGSKILKEHPVENTQLQNDKLYLYYLQNGKDMYTGQELDIDR | |
| | LSDYDVDHIIPQSFIKDDSIDNKVLTSSEKARGKSDNVPSEEVVKKMKSYWR | |
| | QLLNAKLISQRKFDNLTKAERGGLSELDKAGFIKRQLVETRQITKHVAQILD | |
| | SRFNTKYDENDKLIREVKIITLKSKLVSDFRKDFQFYKVREINNYHHAHDAY | |
| | LNAVVGTALIKKYPKLESEFVYGDYKVYDVYKMVAKSEQEIGKATAKRFFYS | |
| | NIMNFFKTEIKLANGTIRKRPLIETNEETGEIVWDKTKDFATVRKVLSMPQV | |
| | NIVKKTEVQTGGFSKESILPKRNSDKLIARKKDWDTKKYGGFDSPTVAYSVL | |
| | VVAKVEKGKSKKLKTVKELVGITIMERSSFEKNPVAFLEDKGYQNIQEDLII | |
| | KLPKYSLFELENGRKRLLASAGELQKGNELALPQKYVTFLYLASHYEKLKGK | |
| | PEDEEKKQLFVEQHKSYFDEIMDQISEFSERYILADANLEKILSLYNEFEDK | |
| | SIEEQAESFINLFTFTALGAPAAFKFFDTTIDRKRYTSTKEILNATLIHQSI | |
| | TGLYETRIDLSQLGGD | |
| CasEnd-126 | MDKKYSIGLDIGTNSVGWAVITDEYKVPSKKFKVLGNTDRHSIKKNLIGALL | 86 |
| | FDSGETAEATRLKRTARRRYTRRKNRICYLQEIFSNEMAKVDPSFFERLEES | |
| | FLVEEDKKTSRHPIFGNIVEEVAYHEKYPTIYHLRKKLVDSKEKADLRLIYL | |
| | ALAHMIKFRGHFLIEGDLNPDNSDVDKLFIQLVQTYNQLFEENPINASGVDA | |
| | KAILSARLSKSRRLENLIAQLPGEKKNGLFGNLIALSLGLTPNFKSNEDLAE | |
| | DAKLQLSKDTYDDDLDNLLAQIGDQYADLFLAAKNLSDAILLSDILRVNTSD | |
| | TNAPLSASMIKRYDDHHQDLTKLKELVRKELPEKYKEIFFDQNKNGYAGYID | |
| | GGATQEEFYKYIKPILESMKGTKELLEKLEKRDLLRKQRTFDNGSIPHQIHL | |
| | GELRAILKRQEKFYPFLKENREKIEKILTFRIPYYVGPLARGNSRFAWMTRK | |
| | SEETITPWNFEEVVDKGASAQSFIERMTNFDKNLPNEKVLPKHSLLYEYFTV | |
| | YNELTKVKYVTEGMRKPAFLSGEQKKAIVDLLFKTNRKVTVKQLKEDYFKKI | |
| | ECFDSVEISGVEDRFNASLGTYHDLLKIIKDKDFLDNEENEDILEDIVLTLT | |
| | LFEDREMIEERLKTYAHLFDDKVMKQLKRRRYTGWGRLSRKLINGIRDKQSG | |
| | KTILDFLKSDGFANRNFMQLIHDDSLTFKEDIQKAQVSGQGDSLHEHIANLA | |
| | GSPAIKKGILQTVKVVDELVKVMGRHKPENIVIEMARENQTTQKGQKNSRER | |
| | MKRIEEGIKELGSQILKEHPVENTQLQNEKLYLYYLQNGRDMYVDQELDINR | |
| | LSDYDVDHIVPQSFLKDDSIDNKVLTRSDKARGKSDNVPSEEVVKKMKNYWR | |
| | QLLNAKLITQRKFDNLTKAERGGLSELDKAGFIKRQLVETRQITKHVAQILD | |
| | SRMNTKYDENDKLIREVKVITLKSKLVSDERKDFQFYKVREINNYHHAHDAY | |
| | LNAVVGTALIKKYPKLESEFVYGDYKVYDVRKMIAKSEQEIGKATAKYFFYS | |
| | NIMNFFKTEITLANGEIRKRPLIETNGETGEIVWDKGRDFATVRKVLSMPQV | |
| | NIVKKTEVQTGGFSKESILPKRNSDKLIARKKDWDPKKYGGFDSPTVAYSVL | |
| | VVAKKPVGKKKKLVEVKELLGITIMERSKFEKDPLGFLKEKGYEDVKMDKII | |
| | KLPKYSLFELGNGRKRMLASAGELQKGNELALPSEYVNFLYLASNYEKLKGS | |
| | PEEIKEKQKYVEENKSYLDEIIKQISEFSKRVIKADANLKKVLEAYEKHKDK | |
| | PISEQAENIIHLFTLTALGAPAAFKYFDETIDRKRYTSTKEVLDATLIHQSI | |
| | TGLYETRIDLKFLGGD | |
| CasEnd-127 | MDKKYSIGLDIGTNSVGWAVITDEYKVPSKKFKVLGNTDRHSIKKNLIGALL | 87 |
| | FDSGETAEATRLKRTARRRYTRRKNRICYLQEIFSNEMAKVDDSFFHRLEES | |
| | FLVEEDKRHERHPIFGNIVDEVAYHEKYPTIYHLRKKLADSTEKADLRLIYL | |
| | ALAHIIKFRGHFLIEGDLNPENSDVDKLFIQLVQTYNQLFEENPINEEGVDA | |
| | KAILSAKLSKSRRLENLIAQLPGEKRNGLFGNLIALSLGLTPNFKSNEDLAE | |
| | DAKLQLSKDTYDEDLDNLLAQIGDQYADLFLAAKNLSDAILLSDILTVNDEI | |
| | TKAPLSASMIKRYDEHHQDLTLLKALVRQQLPEKYKEIFFDQSKNGYAGYID | |
| | GGASQEEFYKFIKPILEKMDGTEELLAKLNREDFLRKQRTFDNGSIPHQIHL | |
| | GELHAILRRQEDFYPFLKENREKIEKILTFRIPYYVGPLARGNSRFAWMTRK | |
| | SEETITPWNFEEVVDKGASAQAFIERMINEDKNLPEEKVLPKHSLLYEYFTV | |
| | YNELTKVKYVTEGMGKPEFLSGEQKEEIVDLLFKKNRKVTVKQLKEFYFKEI | |
| | ECFDSVEISGVEDRFNASLGTYHDLLKIIKDKDFLDNEENEDILEDIVLTLT | |
| | LFEDREMIEERLKKYADLFDKKVLKQLKRRRYTGWGRLSKKLINGIRDKQSG | |
| | KTILDFLKSDGFANRNFMQLIHDDSLTFKEEIKKAQVKGQGDSLHEHIANLA | |
| | GSPAIKKGILQTVKVVDELVKVMGRHKPENIVIEMARENQTTQKGQKNSRER | |
| | MKRLEEGIKELGSQILKEHPVENTQLQNEKLYLYYLQNGKDMYTGQELDIDR | |
| | LSDYDVDHIIPQSFIKDDSIDNKVLTSSEKARGKSDNVPSEEVVKKMKSYWR | |
| | QLLNAKLISQRKFDNLTKAERGGLSELDKAGFIKRQLVETRQITKHVAQILD | |
| | SRMNTKYDENDKLIREVKVITLKSKLVSDFRKDFQFYKVREINNYHHAHDAY | |
| | LNAVVGTALIKKYPKLESEFVYGDYKVYDVRKMIAKSEQEIGKATAKYFFYS | |
| | NIMNFFKTEITLANGEIRKRPLIETNGETGEIVWDKGRDFATVRKVLSMPQV | |
| | NIVKKTEVQTGGFSKESILPKRESDKLIARKKDWDPKKYGGFDSPTVAYSVL | |
| | VVAKVEKGKAKKLKTVKELVGITIMERSSFEKDPVAFLEAKGYKEVQKDLII | |
| | KLPKYSLFELENGRKRLLASAGELQKGNELALPQKYVTFLYLASHYEKLKGS | |
| | PEDEEQKQLYVEQHRHYFDEILEQISEFSERYILADKNLEKILSLYNKFEDL | |
| | SIKEQAESIINLFTLTALGAPAAFKFFDTTIDRKRYTSTKEILNSTLIHQSI | |
| | TGLYETRIDLSQLGGD | |
| CasEnd-128 | MDKKYSIGLDIGTNSVGWAVITDEYKVPSKKFKVLGNTDRHSIKKNLIGALL | 88 |
| | FDSGETAEATRLKRTARRRYTRRKNRICYLQEIFSNEMAKVDDSFFHRLEES | |
| | FLVEEDKKHERHPIFGNIVDEVAYHEKYPTIYHLRKELADSTEKADLRLIYL | |
| | ALAHIIKFRGHFLIEGDLNSENSDVQKLFIQLVQTYNQLFEENHLNEEGVDA | |
| | KAILSAKLSKSRRLENLIAQLPGEKRNGLFGNLLALSLGLTPNFKSNFGLSE | |
| | DAKLQLSKDTYDEDLENLLAQIGDQYADLFVAAKNLSDAILLSGILTVNDES | |
| | TKAPLSASMIKRYDEHHQDLTLLKALVRQQLPEKYKEIFFDESKNGYAGYID | |
| | GGASQEEFYKYIKPILEKMDGTEEFLAKINREDFLRKQRTFDNGSIPHQIHL | |
| | GELHAILRRQEEFYPFLKENREKIEKILTFRIPYYVGPLARGNSRFAWMTRK | |
| | SDETITPWNFEEVVDKEASAQAFIERMTNFDKNLPSEKVLPKHSLLYEYFTV | |
| | YNELTKVKYVTEGMGKPEFFSGEQKQEIVDLLFKKNRKVTVKKLKEFLFKEI | |
| | ECFDIVEISGVEDAFNASLGTYHDLLKIIKDKDFLDNEENEDILEDIVLTLT | |
| | LFEDREMIEKRLKKYADLFDKKVLKQLKRRRYTGWGRLSKKLINGIRDKQSG | |
| | KTILDFLKSDGFANRNFMQLIHDDSLTFKEEIKKAQVKGQGDSLHEHIANLA | |
| | GSPAIKKGILQTVKVVDELVKVMGRHKPENIVIEMARENQTTQKGQKNSRER | |
| | MKRIEEGIKELGSQILKEHPVENTQLQNEKLYLYYLQNGRDMYVDQELDINR | |
| | LSDYDVDHIVPQSFLKDDSIDNKVLTRSDKARGKSDNVPSEEVVKKMKNYWR | |
| | QLLNAKLITQRKFDNLTKAERGGLSELDKAGFIKRQLVETRQITKHVAQILD | |
| | SRMNTKYDENDKLIREVKVITLKSKLVSDFRKDFQFYKVREINNYHHAHDAY | |
| | LNAVVGTALIKKYPKLESEFVYGDYKVYDVRKMIAKSEQEIGKATAKYFFYS | |
| | NIMNFFKTEITLANGEIRKRPLIETNGETGEIVWDKGRDFATVRKVLSMPQV | |
| | NIVKKTEVQTGGFSKESILPKRNSDKLIARKKDWDPKKYGGFDSPTVAYSVL | |
| | VVAKVEKGKSKKLKSVKELLGITIMERSSFEKNPIDFLEAKGYKEVKKDLII | |
| | KLPKYSLFELENGRKRMLASAGELQKGNELALPSKYVNFLYLASHYEKLKGS | |
| | PEDNEQKQLFVEQHKHYLDEIIEQISEFSKRVILADANLDKVLSAYNKHRDK | |
| | PIREQAENIIHLFTLTNLGAPAAFKYFDTTIDRKRYTSTKEVLDATLIHQSI | |
| | TGLYETRIDLSQLGGD | |
| CasEnd-129 | MDKKYSIGLDIGTNSVGWAVITDEYKVPSKKFKVLGNTDRHSIKKNLIGALL | 89 |
| | FDSGETAEATRLKRTARRRYTRRKNRIRYLQEIFSEEMAKVDDSFFHRLEES | |
| | FLVEEDKKHERHPIFGNIVEEVAYHEKYPTIYHLRKKLADSTEKADLRLIYL | |
| | ALAHMIKFRGHFLIEGDLNSDNSDVQKLFIQLVQTYNQLFEENPLNESGVDA | |
| | KAILSARLSKSRRLENLIAQFPGEKKNGLFGNLIALSLGLTPNFKSNEDLAE | |
| | DAKLQLSKDTYDEDLENLLAQIGDQYADLFLAAKNLSDAILLSDILTVNSEI | |
| | TKAPLSASMVKRYDEHHQDLTLLKALVRQQLPEKYKEIFFDQSKNGYAGYID | |
| | GGASQEEFYKYIKPILEKVDGSEEFLDKIEREDFLRKQRTFDNGSIPHQIHL | |
| | QELHAILRRQEDFYPFLKENREKIEKILTFRIPYYVGPLARGNSRFAWMTRK | |
| | SDETITPWNFEEVVDKEASAQSFIERMTNFDKNLPNEKVLPKHSLLYEYFTV | |
| | YNELTKVKYVTEGMRKPEFLSGEQKQEIVDLLFKKNRKVTVKQLKEFLFKEF | |
| | ECFDSVEISGVEDRFNASLGTYHDLLKIIKDKDFLDNEENEDILEDIVLTLT | |
| | LFEDREMIEERLKKYADLFDDKVLKQLKRRRYTGWGRLSKKLINGIRDKQSG | |
| | KTILDFLKADGFANRNFMQLIHDDSLTFKEEIQKAQVSGQGESLHELIANLA | |
| | GSPAIKKGILQTIKIVDELVKVMGRHAPENIVIEMARENQTTQKGQKNSRER | |
| | MKRIEEGIKELGSQILKEHPVENTQLQNEKLYLYYLQNGRDMYVDQELDINR | |
| | LSDYDVDHIVPQSFLKDDSIDNKVLTRSDKARGKSDNVPSEEVVKKMKNYWR | |
| | QLLNAKLITQRKFDNLTKAERGGLSELDKAGFIKRQLVETRQITKHVAQILD | |
| | SRFNTKYDENDKLIRDVKIITLKSKLVSDFRKDFQLYKVREINNYHHAHDAY | |
| | LNAVVGTALIKKYPKLESEFVYGDYKVYDVRKMIAKSEQEIGKATAKYFFYS | |
| | NIMNFFKTEVTLANGEIRKRPLIETNGETGEIVWDKEKDFATVRKVLSMPQV | |
| | NIVKKTEVQTGGFSKESILPKRNSDKLIARKKDWDPKKYGGFDSPTVAYSVL | |
| | VIAKVEKGKAKKLKTVKELVGITIMERSSFEKNPIAFLEAKGYKEVKKDLII | |
| | KLPKYSLFELENGRKRMLASAGELQKGNELALPQKYVTLLYLASHYEKLKGS | |
| | PEDNEQKQLFVEQHKEYFDEIIEQISEFSKRYILADANLEKIKSLYEKNRDA | |
| | TIEEQAENFIHLLTFTALGAPAAFKFFDTTIDRKRYTSTKEILNATLIHQSI | |
| | TGLYETRIDLSQLGGD | |
| CasEnd-130 | MDKKYSIGLDIGTNSVGWAVITDEYKVPSKKFKVLGNTDRHSIKKNLIGALL | 90 |
| | FDSGETAEATRLKRTARRRYTRRKNRICYLQEIFSNEMAKVDDSFFHRLEES | |
| | FLVEEDKKHERHPIFGNIVDEVAYHEKYPTIYHLRKKLADSTEKADLRLIYL | |
| | ALAHMIKFRGHFLIEGDLNPDNSDVDKLFIQLVQTYNQLFEENPINESGVDA | |
| | KAILSAKLSKSRRLENLIAQLPGEKKNGLFGNLIALSLGLTPNFKSNEDLAE | |
| | DAKLQLSKDTYDEDLDNLLAQIGDQYADLFLAAKNLSDAILLSDILTVNSEI | |
| | TKAPLSASMIKRYDEHHQDLTLLKALVRQQLPEKYKEIFFDQSKNGYAGYID | |
| | GGASQEEFYKYIKPILEKMDGTEYLLAKLNREDFLRKQRTFDNGSIPHQIHL | |
| | GELHAILRRQEDFYPFLKENREKIEKILTFRIPYYVGPLARGNSRFAWMTRK | |
| | SDETITPWNFEEVVDKEASAQAFIERMTNFDKNLPNEKVLPKHSLLYEYFTV | |
| | YNELTKVKYVTEGMRKPEFLSGEQKEEIVDLLFKKNRKVTVKQLKEFLFKEI | |
| | ECFDSVEISGVEDRFNASLGTYHDLLKIIKDKDFLDNEENEDILEDIILTLT | |
| | LFEDKEMIEERLKKYANLFDKKVLKQLKRRRYTGWGRLSKKLINGIRDKQSG | |
| | KTILDFLKSDGFANRNFMQLIHDDSLSFKEAIKKAQVSGQGDSLHEHIANLA | |
| | GSPAIKKGILQTVKVVDELVKVMGRHKPENIVIEMARENQTTQKGQKNSRER | |
| | MKRIEEGIKELGSQILKEHPVENTQLQNEKLYLYYLQNGRDMYVDQELDINR | |
| | LSDYDVDHIVPQSFLKDDSIDNKVLTRSDKARGKSDNVPSEEVVKKMKNYWR | |
| | QLLNAKLITQRKFDNLTKAERGGLSELDKAGFIKRQLVETRQITKHVAQILD | |
| | SRMNTKYDENDKLIREVKVITLKSKLVSDFRKDFQFYKVREINNYHHAHDAY | |
| | LNAVVGTALIKKYPKLESEFVYGDYKVYDVRKMIAKSEQEIGKATAKYFFYS | |
| | NIMNFFKTEITLANGEIRKRPLIETNGETGEIVWDKGRDFATVRKVLSMPQV | |
| | NIVKKTEVQTGGFSKESILPKRDSDKLIARKKDWDPKKYGGFDSPTVAYSVL | |
| | VVAKVEKGKSKKLKTVKELVGITIMERSSFEKDPVKFLEAKGYKEIQKDLII | |
| | KLPKYSLFELENGRKRMLASAGELQKGNELALPSKYVTLLYHASHYEKLKGK | |
| | PEDEEQKQEYVEQHNHYFDEIFEQISEFSERYILADKNLEKILSLYSNNRDK | |
| | SISEQAESFINLFTLTALGAPAAFKFFDTTIDRKRYTSTKEILDATLIHQSI | |
| | TGLYETRIDLSQLGGD | |
| CasEnd-131 | MKKKYSIGLDIGTNSVGWAVITDEYKVPSKKFKVLGNTDRHSIKKNLIGALL | 91 |
| | FDSGETAEATRLKRTARRRYTRRKNRICYLQEIFSEEMAKVDDSFFHRLEES | |
| | FLVEEDKKHERHPIFGNIVDEVAYHENYPTIYHLRKELADSDEKADLRLIYL | |
| | ALAHIIKFRGHFLIEGDLNSENSDVQKLFIQLVQTYNQLFEENPINEEGVDA | |
| | KAILTAKLSKSRRLENLIAQLPGEKKNGLFGNLIALSLGLTPNFKSNFELSE | |
| | DAKLQLSKDTYDEDLDNLLGQIGDQYADLFLAAKNLSDAILLSDILTVNDEI | |
| | TKAPLSASMIKRYDEHHQDLTLLKALVREQLPEKYKEIFFDKSKNGYAGYID | |
| | GGASQEEFYKYIKPILEKLDGSEELLEKINREDFLRKQRTFDNGSIPHQIHL | |
| | GELHAILRRQEVFYPFLKENQEKIEKILTFRIPYYVGPLARGNSRFAWMTRK | |
| | SDETITPWNFEEVVDKGASAQAFIERMTNFDKNLPNEKVLPKHSLLYEYFTV | |
| | YNELTKVKYITEGMGKPEFLDGEQKKEIVDLLFKKNRKVTVKQLKEDLFKKI | |
| | ECFDSVEISGVEDRFNASLGTYHDLLKIIKDKDFLDNEENEDILEDIVLTLT | |
| | LFEDREMIEERLKKYANLFDKKVLKQLKRRRYTGWGRLSKKLINGIRDKQSG | |
| | KTILDFLKSDGFANRNFMQLIHDDSLTFKEEIKKAQVIGQGDSLHEQIANLA | |
| | GSPAIKKGILQTVKIVDEIVKVMGRHAPENIVIEMARENQTTQKGQKNSRER | |
| | MKRIEEVLKKLGSQILKEHPVENTQLQNEKLYLYYLQNGKDMYTGEELDIDR | |
| | LSDYDVDHIIPQSFIKDDSIDNKVLTSSKEARGKSDNVPSEEVVKKMKSYWR | |
| | QLLNAKLISQRKFDNLTKAERGGLSELDKAGFIKRQLVETRQITKHVAQILD | |
| | SRFNTERDENDKLIRNVKIITLKSKLVSDFRKDFGFYKVREINDYHHAHDAY | |
| | LNAVVGTALIKKYPKLESEFVYGDYKVYDSRKMIAKSEQEIGKATAKMFFYS | |
| | NIMNFFKTEIKLANGEIIKRPVIETNEETGEIVWDKGKDFATVRKVLSMPQV | |
| | NIVKKTEVQTGGFSKESILPKRNSDKLIARKKDWDTKKYGGFDSPTVAYSVL | |
| | VVAKVEKGKSKKLKTVKELVGITIMERSSFEKDPIAFLEAKGYQHIRKDLII | |
| | KLPKYSLFELENGRKRLLASAGELQKGNELALPNKYVTFLYLASHYEKLKGK | |
| | PEDEEEKRLYVEQHKHYFDEILDQISEFSKRYILADKNLEKILDLYNKHEDY | |
| | SINELASNFLNLFTLTSLGAPAAFKFFDTTIDRKRYTSTKEILNSTLIHQSI | |
| | TGLYETRIDLSQLGGD | |
| CasEnd-132 | MDKKYSIGLDIGTNSVGWAVITDEYKVPSKKFKVLGNTDRHSIKKNLIGALL | 92 |
| | FDSGETAEATRLKRTARRRYTRRKNRICYLQEIFSNEMAKVDDSFFHRLEES | |
| | FLVPEDKRHERHPIFGNIVDEVAYHEKYPTIYHLRKKLADSDEKADLRLIYL | |
| | ALAHMIKFRGHFLIEGDLNSDNSDVNKLFKQLVQTYNQLFEENPINEETVDA | |
| | KAILSEKLSKSRRLENLIAQFPGEKKNGLFGNLLALSLGLTPNFKSNEDLAE | |
| | DAKLQLSKDTYDEDLENLLGQIGDQYADLFLAAKNLYDAILLSDILTVNDES | |
| | TKAPLSASMVKRYEEHHQDLKLLKKLVREQLPEKYKEIFSDKSKNGYAGYID | |
| | GGTSQEEFYKYIKPILEKVDGSEEFLEKIEREDFLRKQRTFDNGSIPHQIHL | |
| | GELHAILRRQEEYYPFLKENREKIEKILTFRIPYYVGPLARGNSRFAWMSRK | |
| | SDEKITPWNFDEVVDKEASAQKFIERMTNNDTYLPNEKVLPKHSLLYEKFTV | |
| | YNELTKVKYVTEGMRKPEFLSAEQKQEIFDLLFKKNRKVTKKKLKEDYFKKF | |
| | ECFDSVEISGVEDRFNASLGTYHDLLKIIKDKDFLDNEENEDILEDIVLTLT | |
| | LFEDREMIKERLKKYADLFDDKQLKQLKRRHYTGWGRLSAKLINGIRDKQSG | |
| | KTILDYLKEDGFANRNFMQLIHDDSLTFKEEIEKAQVSGQGDSLHEHIANLA | |
| | GSPAIKKGILQTVKVVDELVKVMGRHKPENIVIEMARENQTTQKGQRNSRQR | |
| | LKKLEEGIKELGSKILKEHPVENQQLQNDKLYLYYLQNGKDMYTGEELDIDR | |
| | LSQYDIDHIIPQSFIKDDSIDNKVLVSSKKARGKSDDVPSEEVVKKMKNYWR | |
| | QLLEAKLISQRKFDNLTKAERGGLSELDKAGFIKRQLVETRQITKHVAQILD | |
| | SRMNTKYDENDKLIREVKVITLKSKLVSDFRKDFQFYKVREINNYHHAHDAY | |
| | LNAVVGTALIKKYPKLESEFVYGDYKVYDVRKMIAKSEQEIGKATAKYFFYS | |
| | NIMNFFKTEITLANGEIRKRPLIETNGETGEIVWDKGRDFATVRKVLSMPQV | |
| | NIVKKTEVQTGGFSKESILPKRNSDKLIARKKDWDPKKYGGFDSPTVAYSVL | |
| | VVAKVEKGKSKKLKSVKELLGITIMERSSFEKNPIDFLEAKGYKEVKKDLII | |
| | KLPKYSLFELENGRKRMLASAGELQKGNELALPSKYVNFLYLASHYEKLKGS | |
| | PEDNEQKQLFVEQHKHYLDEIIEQISEFSKRVILADANLDKVLSAYNKHRDK | |
| | PIREQAENIIHLFTLTNLGAPAAFKYFDTTIDRKRYTSTKEVLDATLIHQSI | |
| | TGLYETRIDLSQLGGD | |
| CasEnd-133 | MDKKYSIGLDIGTNSVGWAVITDEYKVPSKKFKVLGNTDRHSIKKNLIGALL | 93 |
| | FDSGETAEATRLKRTARRRYTRRKNRICYLQEIFSNEMAKVDDSFFHRLEES | |
| | FLVEEDKKHERHPIFGNIVDEVAYHEKYPTIYHLRKKLADSTEKADLRLIYL | |
| | ALAHIIKFRGHFLIEGDLNPENSDVDKLFIQLVQTYNQLFEENPINEEGVDA | |
| | KAILTAKLSKSRRLENLIAQFPGEKRNGLFGNLIALSLGLTPNFKSNFDLAE | |
| | DAKLQLSKDTYDEDLENLLGQIGDQYADLFLAAKNLSDAILLSGILTVNSES | |
| | TKAPLSASMIKRYDEHHQDLTLLKAFVRQQLPEKYKEIFFDESKNGYAGYID | |
| | GGASQEEFYKYIKPILEKLDGTEEFLAKLNREDFLRKQRTFDNGSIPHQIHL | |
| | GELHAILRRQEEFYPFLKENREKIEKILTFRIPYYVGPLARGNSRFAWMTRK | |
| | SEETITPWNFEEVVDKEASAQAFIERMTNFDKNLPTEKVLPKHSLLYEYFTV | |
| | YNELTKVKYVTEGMGKPEFFDGEQKQEIFDGLFKKNRKVTVKQLKDFLFKEF | |
| | EEFRIVDISGVEDAFNASLGTYHDLLKIIKDKDFLDNEENEDILEDIVLTLT | |
| | LFEDREMIEKRLEKYADLFDKKVLKQLKRRRYTGWGRLSKKLINGIRDKQSG | |
| | KTILDFLKSDGFANRNFMQLIHDDSLTFKEEIKKAQVEGQGDSLHEHIANLA | |
| | GSPAIKKGILQTVKVVDELVKVMGRHKPENIVIEMARENQTTQKGQKNSRER | |
| | MKRIEEGIKELGSQILKEHPVENTQLQNEKLYLYYLQNGRDMYVDQELDINR | |
| | LSDYDVDHIVPQSFLKDDSIDNKVLTRSDKARGKSDNVPSEEVVKKMKNYWR | |
| | QLLNAKLITQRKFDNLTKAERGGLSELDKAGFIKRQLVETRQITKHVAQILD | |
| | SRMNTKYDENDKLIREVKVITLKSKLVSDFRKDFQFYKVREINNYHHAHDAY | |
| | LNAVVGTALIKKYPKLESEFVYGDYKVYDVRKMIAKSEQEIGKATAKYFFYS | |
| | NIMNFFKTEITLANGEIRKRPLIETNGETGEIVWDKGRDFATVRKVLSMPQV | |
| | NIVKKTEVQTGGFSKESILPKRNSDKLIARKKDWDPKKYGGFDSPTVAYSVL | |
| | VVAKVEKGKSKKLKSVKELLGITIMERSSFEKNPIDFLEAKGYKEVKKDLII | |
| | KLPKYSLFELENGRKRMLASAGELQKGNELALPSKYVNFLYLASHYEKLKGS | |
| | PEDNEQKQLFVEQHKHYLDEIIEQISEFSKRVILADANLDKVLSAYNKHRDK | |
| | PIREQAENIIHLFTLTNLGAPAAFKYFDTTIDRKRYTSTKEVLDATLIHQSI | |
| | TGLYETRIDLSQLGGD | |
| CasEnd-134 | MDKKYSIGLDIGTNSVGWAVITDEYKVPSKKFKVLGNTDRHSIKKNLIGALL | 94 |
| | FDSGETAEATRLKRTARRRYTRRKNRICYLQEIFSNEMAKVDDSFFHRLEES | |
| | FLVEEDKKHERHPIFGNIVDEVAYHEKYPTIYHLRKKLADSTEKADLRLIYL | |
| | ALAHIIKFRGHFLIEGDLNPENSDVQKLFIQLVQTYNQLFEENPINEETVDA | |
| | KAILSAKLSKSRRLENLIAQFPGEKKNGLFGNLIALSLGLIPNFKSNEDLSE | |
| | DAKLQLSKDTYDEDLDNLLAQIGDQYADLFLAAKNLSDAILLSDILTVNDEI | |
| | TKAPLSASMIKRYDEHHQDLTLLKALVRQQLPEKYKEIFFDQSKNGYAGYID | |
| | GGASQEEFYKYIKPILEKMDGTEELLAKLNREDLLRKQRTFDNGSIPHQIHL | |
| | GELHAILRRQEEFYPFLKENREKIEKILTFRIPYYVGPLARGNSRFAWMTRK | |
| | SEETITPWNFEEVVDKGASAQAFIERMTNFDKNLPNEKVLPKHSLLYEYFTV | |
| | YNELTKVKYVTEGMGKPEFLSGEQKKEIVDLLFKKNRKVTVKQLKEDYFKKI | |
| | ECFDSVEISGVEDRFNASLGTYHDLLKIIKDKDFLDNEENEDILEDIVLTLT | |
| | LFEDKEMIEERLKKYANLFDKKVLKQLKRRRYTGWGRLSRKLINGIRDKQSG | |
| | KTILDFLKSDGFANRNFMQLIHDDSLTFKEEIKKAQVSGQGDSLHEHIANLA | |
| | GSPAIKKGILQTVKVVDELVKVMGRHKPENIVIEMARENQTTQKGQKNSRER | |
| | MKRIEEGIKELGSQILKEHPVENTQLQNEKLYLYYLQNGRDMYVDQELDINR | |
| | LSDYDVDHIVPQSFLKDDSIDNKVLTRSDKARGKSDNVPSEEVVKKMKNYWR | |
| | QLLNAKLITQRKFDNLTKAERGGLSELDKAGFIKRQLVETRQITKHVAQILD | |
| | SRMNTKYDENDKLIREVKVITLKSKLVSDFRKDFQFYKVREINNYHHAHDAY | |
| | LNAVVGTALIKKYPKLESEFVYGDYKVYDVRKMIAKSEQEIGKATAKYFFYS | |
| | NIMNFFKTEITLANGEIRKRPLIETNGETGEIVWDKGRDFATVRKVLSMPQV | |
| | NIVKKTEVQTGGFSKESILPKRNSDKLIARKKDWDTKKYGGFDSPTVAYSVL | |
| | VVAKVEKGKSKKLKTVKELVGITIMERSSFEKDPVAFLEDKGYKDIQKDLII | |
| | KLPKYSLFELENGRKRLLASAGELQKGNELALPNKYVTFLYHASHYEKLKGS | |
| | PEDNEQKRLYVEQHRDYFDEILDQISEFSERYILADKNLEKIKSLYNEFEDK | |
| | SIEELAESFINLFTLTALGAPAAFKFFDTTIDRKRYTSTKEILDATLIHQSI | |
| | TGLYETRIDLSQLGGD | |
| CasEnd-135 | MKKKYSIGLDIGTNSVGWAVITDEYKVPSKKFKVLGNTDRHSIKKNLIGALL | 95 |
| | FDSGETAEATRLKRTARRRYTRRKNRIRYLQEIFAEEMAKVDDSFFQRLEES | |
| | FLVEEDKRNERHPIFGNIVDEVAYHEKYPTIYHLRKELVDSDEKADLRLIYL | |
| | ALAHMIKFRGHFLIEGDLNSENSDVQKLFIQLVQTYNQLFEESPLDEEGVDA | |
| | KAILSDKVSKSRRLENLIALFPGEKKNGLFGNLIALSLGLTPNFKTNFVLAE | |
| | DAKLQFSKDTYDEDLENLLGQIGDQYADLFLAAKNLSDAILLSGILRVDDES | |
| | TKAPLSASMIKRYDEHHQDLTLLKTLVRQQLPEKYKEIFFDKTKNGYAGYID | |
| | GGASQEEFYKYIKPILEKMDGTEYLLDKLEREDLLRKQRTFDNGSIPHQIHL | |
| | GELHAILRRQEDFYPFLKENQEKIEKILTFRIPYYVGPLARGNSRFAWMTRK | |
| | SDETITPWNFEEVVDKGASAQAFIERMTNFDKNLPEEKVLPKHSLLYEKFTV | |
| | YNELTKVKYVTEGMGKPEFLSANQKKEIVDLLFKKNRKVTVKKLKEFYFQKF | |
| | DCFRIVEISGVEDRFNASLGTYHDLLKIIKDKEFLDNEANEEILEDIVLTLT | |
| | LFEDREMIEKRLKKYAHLFDKKVMKQLKRRRYTGWGRLSKKLINGIRDKQSG | |
| | KTILDFLISDGFANRNFMQLIHDDSLTFKEEIKKAQVKGQSDSLHEQIADLA | |
| | GSPAIKKGILQTVKVVDELVKVMGRHKPENIVIEMARENQTTQKGQRNSRER | |
| | LKRIEEGIKKLGSKILKEYPVENTQLQNDKLYLYYLQNGRDMYTGEELDIDR | |
| | LSDYDVDHIVPQSFIKDDSIDNKVLTRSKEARGKSDDVPSEEVVRKMKSYWR | |
| | QLLKAGLITQRKFDNLTKAERGGLSELDKAGFIKRQLVETRQITKHVAQILD | |
| | SRMNTERDENDKLIRDVKVITLKSKLVSDFRKDFQFYKVREINDYHHAHDAY | |
| | LNAVVGTALIKKYPKLESEFVYGDYKVYDSYKMIAKSEQEIGKATAKYFFYS | |
| | NIMNFFKTEITLANGEIRKRPLIETNGETGEIVWDKGRDFATVRKVLSMPQV | |
| | NIVKKTEVQTGGFSKESILPKRNSDKLIARKKDWDPKKYGGFDSPTVAYSVL | |
| | VVAKVEKGKSKKLKSVKELLGITIMERSSFEKNPIDFLEAKGYKEVKKDLII | |
| | KLPKYSLFELENGRKRMLASAGELQKGNELALPSKYVNFLYLASHYEKLKGS | |
| | PEDNEQKQLFVEQHKHYLDEIIEQISEFSKRVILADANLDKVLSAYNKHRDK | |
| | PIREQAENIIHLFTLTNLGAPAAFKYFDTTIDRKRYTSTKEVLDATLIHQSI | |
| | TGLYETRIDLSQLGGD | |
| CasEnd-136 | MDKKYSIGLDIGTNSVGWAVITDEYKVPSKKFKVLGNTDRHSIKKNLIGALL | 96 |
| | FDSGETAEATRLKRTARRRYTRRKNRICYLQEIFSNEMAKVDDSFFHRLEES | |
| | FLVEEDKRHERHPIFGNIVDEVAYHEKYPTIYHLRKKLADSTEKADLRLIYL | |
| | ALAHIIKFRGHFLIEGDLNSDNSDVQKLFIQLVQTYNQLFEENPLNESGVDA | |
| | KAILSAKLSKSRRLENLIAQLPGEKKNGLFGNLIALSLGLTPNFKSNEGLSE | |
| | DAKLQLSKDTYDEDLENLLAQIGDQYADLFLAAKNLSDAILLSDILTVNDEI | |
| | TKAPLSASMIKRYDEHHQDLTLLKALVRQQLPEKYKEIFFDKSKNGYAGYID | |
| | GGASQEEFYKYIKPILEKMDGAEELLAKINREDFLRKQRTFDNGSIPHQIHL | |
| | GELHAILRRQEEFYPFLKENREKIEKILTFRIPYYVGPLARGNSRFAWMTRK | |
| | SEETITPWNFEEVVDKEASAQAFIERMTNFDKNLPSEKVLPKHSLLYEYFTV | |
| | YNELTKVKYVTEGMGKAEFFDANQKQEIFDGLFKKYRKVTKKRLLEFLDKEF | |
| | DEFRIVDISGVEDAFNASLGTYHDLLKIIKDKDFLDNEENEDILEDIVLTLT | |
| | LFEDREMIEERLEKYANLFDKKVLKQLKRRRYTGWGRLSKKLINGIRDKQSG | |
| | KTILDFLKSDGFANRNFMQLIHDDSLTFKEEIQKAQVSGQGDSLHEHIANLA | |
| | GSPAIKKGILQTVKVVDELVKVMGRHKPENIVIEMARENQTTQKGQKNSRER | |
| | MKRIEEGIKELGSQILKEHPVENTQLQNEKLYLYYLQNGRDMYVDQELDINR | |
| | LSDYDVDHIVPQSFLKDDSIDNKVLTRSDKARGKSDNVPSEEVVKKMKNYWR | |
| | QLLNAKLITQRKFDNLTKAERGGLSELDKAGFIKRQLVETRQITKHVAQILD | |
| | SRMNTKYDENDKLIREVKVITLKSKLVSDFRKDFQFYKVREINNYHHAHDAY | |
| | LNAVVGTALIKKYPKLESEFVYGDYKVYDVRKMIAKSEQEIGKATAKYFFYS | |
| | NIMNFFKTEITLANGEIRKRPLIETNGETGEIVWDKGRDFATVRKVLSMPQV | |
| | NIVKKTEVQTGGFSKESILPKRNSDKLIARKKDWDPKKYGGFDSPTVAYSVL | |
| | VVAKVEKGKSKKLKSVKELLGITIMERSSFEKNPIDFLEAKGYKEVKKDLII | |
| | KLPKYSLFELENGRKRMLASAGELQKGNELALPSKYVNFLYLASHYEKLKGS | |
| | PEDNEQKQLFVEQHKHYLDEIIEQISEFSKRVILADANLDKVLSAYNKHRDK | |
| | PIREQAENIIHLFTLTNLGAPAAFKYFDTTIDRKRYTSTKEVLDATLIHQSI | |
| | TGLYETRIDLSQLGGD | |
| CasEnd-137 | MDKKYSIGLDIGTNSVGWAVITDEYKVPSKKFKVLGNTDRKSIKKNLIGALL | 97 |
| | FDSGETAEATRLKRTARRRYTRRKNRIRYLQEIFAEEMAKVDDSFFHRLEES | |
| | FLVEEDKRNERHPIFGNIVDEVAYHEKYPTIYHLRKKLVDSDEKADLRLIYL | |
| | ALAHMIKFRGHFLIEGDLNSDNSDVQKLFKELVQTYNQLFEEKPIDASGVDA | |
| | KAILSEKLSKSRRLENLIAELPGEKKNGLFGNLIALSLGLTPNFKSNFDLEE | |
| | DAKLQLSKDTYDDDLENLLGQIGDQYADLFLAAKNLSDAILLSGILRVNTEI | |
| | TKAPLSASMIKRYDEHHQDLTLLKQLVRQQLPEKYKEIFFDQSKNGYAGYID | |
| | GGASQEEFYKYIKKILEKMDGTEELLDKLNREDLLRKQRTFDNGSIPHQIHL | |
| | GELHAILRRQEEYYPFLKENREKIEKILTFRIPYYVGPLARGNSRFAWMKRK | |
| | SDETITPWNFEEVVDKGASAQAFIERMTNFDKNLPNEKVLPKHSLLYEYFTV | |
| | YNELTKVKYVTEGMRKPEFLSGEQKKEIVDLLFKKNRKVTVKQLKEDYFKKE | |
| | ECFDSVEISGVEDRFNASLGTYHDLLKIIKDKDFLDNDENEDILEDIVLTLT | |
| | LFEDREMIKERLEKYANLFDDKVMKQLKRRRYTGWGRLSKKLINGIRDKQSG | |
| | KTILDFLIADGFANRNFMQLIHDDSLTFKDEIEKAQVIGKGESLHEHIANLA | |
| | GSPAIKKGILQTVKVVDELVKVMGRHKPENIVIEMARENQTTQKGQKNSRER | |
| | MKRIEEGIKELGSQILKEHPVENTQLQNEKLYLYYLQNGRDMYVDQELDINR | |
| | LSDYDVDHIVPQSFLKDDSIDNKVLTRSDKARGKSDNVPSEEVVKKMKNYWR | |
| | QLLNAKLITQRKFDNLTKAERGGLSELDKAGFIKRQLVETRQITKHVAQILD | |
| | SRMNTEYDENDKLIRDVKVITLKSKLVSDFRKDFGFYKVREINNYHHAHDAY | |
| | LNAVVGTALIKKYPKLESEFVYGDYKVYDVRKMIAKSEQEIGKATAKYFFYS | |
| | NIMNFFKSEITLANGEIRKRPLIETNEETGEIVWDKEKDFATVRKVLSMPQV | |
| | NIVKKTEVQTGGFSKESILPKRNSDKLIARKKDWDPTKYGGFDSPTVAYSVL | |
| | VVAKIEKGKAKKLKTVKELLGITIMERSAFEKNPVAFLEDKGYQEVKEDLII | |
| | KLPKYSLFELENGRKRMLASAGELQKGNELALPSKYVNFLYLASHYEKLKGS | |
| | TEDNKYKQLYVEQHREYLDEIIDQISEFSERVILADANLEKVKSAYEKHREK | |
| | SIEEQAENIIHLFTLTALGAPAAFKYFDTTIDRKRYTSTKEVLNATLIHQSI | |
| | TGLYETRIDLSQLGGD | |
| CasEnd-138 | MDKKYSIGLDIGTNSVGWAVITDEYKVPSKKFKVLGNTDRHSIKKNLIGALL | 98 |
| | FDSGETAEATRLKRTARRRYTRRKNRICYLQEIFSNEMAKVDDSFFQRLEES | |
| | FLVEEDKKNERHPIFGNIVDEVAYHEKYPTIYHLRKKLVDSDEKADLRLIYL | |
| | ALAHMIKFRGHFLIEGDLNSDNSDVQKLFIELVDTYNQLFEESPIEAEEVDA | |
| | KAILSERLSKSRRLENLIAELPGEKKNGLFGNLIALSLGLTPNFKSNFDLSE | |
| | DAKLQLSKDTYDDDLEELLGQIGDEYADLFLAAKNLSDAILLSGILRVKTES | |
| | TKAPLSASMIKRYDEHHQDLTLLKQLVRKQLPEKYKEIFFDQSKNGYAGYID | |
| | GGASQEEFYKYIKKILEKMDGTEELLDKLDREDLLRKQRTFDNGSIPHQIHL | |
| | GELRAILRRQEKYYPFLKENREKIEKILTFRIPYYVGPLARGNSRFAWMIRK | |
| | SDETITPWNFDEVVDKGASAEKFIERMTNFDKNLPEEKVLPKHSLLYEYFTV | |
| | YNELTKVKYVTEGMRKPEFLDGEQKKEIVDLLFKKNRKVTVKQLKEYYFKEF | |
| | ECFDSVEISGVEDRFNASLGTYHDLLKIIKDKAFLDNEENEKILEDIVLTLT | |
| | LFEDREMIKKRLEKYANLFDKKVMKQLKRRRYTGWGRLSKKLINGIRDKQSG | |
| | KTILDFLIDDGFTNRNFMQLIHDDSLTFKDEIEKAQVIGKGDSLHEHIANLA | |
| | GSPAIKKGILQTVKVVDELVKVMGRHKPENIVIEMARENQTTQKGQKNSRER | |
| | MKRIEEGIKELGSQILKEHPVENTQLQNEKLYLYYLQNGRDMYVDQELDINR | |
| | LSDYDVDHIVPQSFLKDDSIDNKVLTRSDKARGKSDNVPSEEVVKKMKNYWR | |
| | QLLNAKLITQRKFDNLTKAERGGLSELDKAGFIKRQLVETRQITKHVAQILD | |
| | SRMNTKYDENDKLIREVKVITLKSKLVSDFRKDFQFYKVREINNYHHAHDAY | |
| | LNAVVGTALIKKYPKLESEFVYGDYKVYDVRKMIAKSEQEIGKATAKYFFYS | |
| | NIMNFFKTEITLANGEIRKRPLIETNGETGEIVWDKGRDFATVRKVLSMPQV | |
| | NIVKKTEVQTGGFSKESILPKRNSDKLIARKKDWDPKKYGGFDSPTVAYSVL | |
| | VVAKVEKGKSKKLKSVKELLGITIMERSSFEKNPIDFLEAKGYKEVKKDLII | |
| | KLPKYSLFELENGRKRMLASAGELQKGNELALPSKYVNFLYLASHYEKLKGS | |
| | PEDNEQKQLFVEQHKHYLDEIIEQISEFSKRVILADANLDKVLSAYNKHRDK | |
| | PIREQAENIIHLFTLTNLGAPAAFKYFDTTIDRKRYTSTKEVLDATLIHQSI | |
| | TGLYETRIDLSQLGGD | |
| CasEnd-139 | MDKKYSIGLDIGTNSVGWAVITDEYKVPSKKFKVLGNTDRHSIKKNLIGALL | 99 |
| | FDSGETAEATRLKRTARRRYTRRKNRICYLQEIFSNEMAKVDDSFFHRLEES | |
| | FLVEEDKRHERHPIFGNIVDEVAYHEKYPTIYHLRKKLADSTEKADLRLIYL | |
| | ALAHIIKFRGHFLIEGDLNSDNSDVQKLFIQLVQTYNQLFEENPINESGVDA | |
| | KAILSAKLSKSRRLENLIAQFPGEKKNGLFGNLIALSLGLTPNFKSNEDLAE | |
| | DAKLQLSKDTYDEDLDNLLAQIGDQYADLFLAAKNLSDAILLSDILTVNSEI | |
| | TKAPLSASMIKRYDEHHQDLTLLKALVRKQLPEKYKEIFFDQSKNGYAGYID | |
| | GGASQEDFYKFIKPILEKMDGTEELLAKINREDFLRKQRTFDNGSIPHQIHL | |
| | GELHAILRRQEEFYPFLKENREKIEKILTFRIPYYVGPLARGNSRFAWMTRK | |
| | SEETITPWNFEEVVDKEASAQSFIERMTNFDKNLPEEKVLPKHSLLYEYFTV | |
| | YNELTKVKYVTEGMRKPEFLSGEQKKEIVDLLFKKNRKVTVKQLKEFYFKKI | |
| | ECFDSVEISGVEDRFNASLGTYHDLLKIIKDKEFLDNEENEDILEDIVLTLT | |
| | LFEDKEMIEERLKKYADLFDDKVLKKLKRRRYTGWGRLSRKLINGIRDKQSG | |
| | KTILDFLKSDGFANRNFMQLIHDDSLTFKEEIKKAQVSGQGDSLHEHIANLA | |
| | GSPAIKKGILQTVKVVDELVKVMGRHKPENIVIEMARENQTTQKGQKNSRER | |
| | MKRIEEGLKELGSQILKEHPVENTQLQNEKLYLYYLQNGKDMYTGDELDIDR | |
| | LSDYDVDHIIPQSFIKDDSIDNKVLTSSDKARGKSDNVPSEEVVKKMKNYWR | |
| | QLLNAKLISQRKFDNLTKAERGGLSELDKAGFIKRQLVETRQITKHVAQILD | |
| | SRMNTKYDENDKLIREVKVITLKSKLVSDFRKDFQFYKVREINNYHHAHDAY | |
| | LNAVVGTALIKKYPKLESEFVYGDYKVYDVRKMIAKSEQEIGKATAKYFFYS | |
| | NIMNFFKTEITLANGEIRKRPLIETNGETGEIVWDKGRDFATVRKVLSMPQV | |
| | NIVKKTEVQTGGFSKESILPKRDSDKLIARKKDWDPKKYGGFDSPTVAYSVL | |
| | VVAKIEKGKAKKLKTVKELVGITIMERSSFEKDPVAFLEDKGYKNIQEDLII | |
| | KLPKYSLFELENGRKRMLASAGELQKGNELALPSKYVILLYLASHYEKLKGS | |
| | PEDNEKKLLYVEQHRHYFDEIFDQISEFSERYILADKNLEKILSLYNENEDK | |
| | SISEQAESFINLFTLTALGAPAAFKFFDTTIDRKRYTSTKEILNATLIHQSI | |
| | TGLYETRIDLSQLGGD | |
| CasEnd-140 | MDKKYSIGLDIGTNSVGWAVITDEYKVPSKKFKVLGNTDRHSIKKNLIGALL | 100 |
| | FDSGETAEATRLKRTARRRYTRRKNRICYLQEIFSNEMAKVDPSFFKRLEES | |
| | FLVEEDKSGSRHPIFGNIVEEVAYHEKYPTIYHLRKKLVDSEEKADLRLIYL | |
| | ALAHMIKFRGHFLIEGDLNPDNSDVDKLFIQLVQTYNQLFEENPINASGVDA | |
| | KAILSARLSKSRRLENLIAQLPGEKKNGLFGNLIALSLGLTPNFKSNFDLAE | |
| | DAKLQLSKDTYDDDLDNLLAQIGDQYADLFLAAKNLSDAILLSDILRVNTKD | |
| | TRAPLSASMIKRYDEHHQDLTELKKLVRKYLPEKYKEIFFDQNKNGYAGYID | |
| | GGATQEEFYEYIKPILESMPGTKHLLEKLENRDLLRKQRTEDNGSIPHQIHL | |
| | GELRAILERQEKFYPFLKENREKIEKILSFRIPYYVGPLARGNSRFAWMTRK | |
| | SEETITPWNFEEVVDKGASAQSFIERMTNFDKNLPNEKVLPKHSLLYEYFTV | |
| | YNELTKVKYVTEGMRKPAFLSGEQKKAIVDLLFKTNRKVTVKQLKEDYFKKI | |
| | ECFDSVEISGVEDRFNASLGTYHDLLKIIKDKDFLDNEENEDILEDIVLTLT | |
| | LFEDREMIEERLKTYAHLFDDKVMKQLKRRRYTGWGRLSRKLINGIRDKQSG | |
| | KTILDFLKSDGFANRNFMQLIHDDSLTFKEDIQKAQVSGQGDSLHEHIANLA | |
| | GSPAIKKGILQTVKVVDELVKVMGRHKPENIVIEMARENQTTQKGQKNSRER | |
| | MKRIEEGIKELGSQILKEHPVENTQLQNEKLYLYYLQNGRDMYVDQELDINR | |
| | LSDYDVDHIVPQSFLKDDSIDNKVLTRSDKARGKSDNVPSEEVVKKMKNYWR | |
| | QLLNAKLITQRKFDNLTKAERGGLSELDKAGFIKRQLVETRQITKHVAQILD | |
| | SRMNTKYDENDKLIREVKVITLKSKLVSDFRKDFQFYKVREINNYHHAHDAY | |
| | LNAVVGTALIKKYPKLESEFVYGDYKVYDVRKMIAKSEQEIGKATAKYFFYS | |
| | NIMNFFKTEITLANGEIRKRPLIETNGETGEIVWDKGRDFATVRKVLSMPQV | |
| | NIVKKTEVQTGGFSKESILPKRKSDKLIARKKDWDPKKYGGFDSPTVAYSVL | |
| | VVAKKPVGKKKELKEVKELLGITIMERSKFEENPLKFLEEKGYKDVKMDEII | |
| | KLPKYSLFELGNGRKRMLASAGELQKGNELALPSEYVNFLYLASNYEKLKGK | |
| | PEEIKEKQEYVEKNKEYLDKIIDQISEFSQRVIKADANLKKVLEAYEKHKDK | |
| | PIKEQAENIIHLFTLTRLGAPAAFKYFDETIDRKRYTSTKEVLDATLIHQSI | |
| | TGLYETRIDLSFLGGD | |
| CasEnd-141 | MDKKYSIGLDIGTNSVGWAVITDEYKVPSKKFKVLGNTDRQSIKKNLIGALL | 101 |
| | FDSGETAEATRLKRTARRRYTRRKNRIRYLQEIFAEEMSKVDDSFFHRLEES | |
| | FLVEEDKKHERHPIFGNIVDEVAYHEKYPTIYHLRKKLADSTEKADLRLIYL | |
| | ALAHIIKFRGHFLIEGDLNSDNSDVQKLFIQLVDTYNQLFEENPIGEEGVDA | |
| | KAILSARLSKSRRLENLIAQIPGEKRNGLFGNLIALSLGLTPNFKSNFDLAE | |
| | DAKLQLSKDTYDEDLDNLLAQIGDQYADLFLAAKNLSDAILLSGILTVNDEI | |
| | TKAPLSASMIKRYDEHHQDLTLLKDLVRQQLPEKYKEIFFDDSKNGYAGYID | |
| | GGASQEEFYKYIKPILEKLDGAEELLAKLNREDFLRKQRTFDNGSIPHQIHL | |
| | GELHAILRRQEDFYPFLKENREKIEKILTFRIPYYVGPLARGNSRFAWMTRK | |
| | SEETITPWNFEEVVDKEASAQSFIERMTNFDKNLPNEKVLPKHSLLYEYFTV | |
| | YNELTKVKYVTEGMRKPEFLSSEQKEAIVDLLFKKNRKVTVKQLKEDYFKKI | |
| | ECFDSVEISGVEDRFNASLGTYHDLLKIIKDKDFLDNEENEDILEDIVLTLT | |
| | LFEDREMIEERLKKYAHLFDKKVLKQLKRRRYTGWGRLSRKLINGIRDKQSG | |
| | KTILDFLKDDGFANRNFMQLIHDDSLTFKEEIQKAQVIGQGDSLHEQIANLA | |
| | GSPAIKKGILQTLKIVDELVKVMGRHAPENIVIEMARENQTTQKGQKNSRER | |
| | MKRIEEGIKELGSQILKEHPVENTQLQNEKLYLYYLQNGRDMYVDQELDINR | |
| | LSDYDVDHIVPQSFLKDDSIDNKVLTRSDKARGKSDNVPSEEVVKKMKNYWR | |
| | QLLNAKLITQRKFDNLTKAERGGLSELDKAGFIKRQLVETRQITKHVAQILD | |
| | SRFNTEYDENNKLIREVKIITLKSKLVSDFRKDFQFYKVREINDYHHAHDAY | |
| | LNAVVGTALIKKYPKLESEFVYGDYKVYDVRKMIRKSEQEIGKATAKYFFYS | |
| | NIMNFFKSEITLANGEIIKRPLIETNEETGEIVWDKGKDFATVRKVLSMPQV | |
| | NIVKKTEVQTGGFSKESILPKRNSDKLIARKKDWDPKKYGGFDSPTVAYSVL | |
| | VIAKVEKGKTKKLKTVKELVGITIMERSSFEKNPIAFLEKKGYQEVQKHLII | |
| | KLPKYSLFELENGRKRLLASAGELQKGNELALPSKYVTLLYLASNYEKLKGK | |
| | SEDNEKKKEYVEQHREEFDEIFNQIIEFSERYILADKNLSKIKELENKNEDS | |
| | DITELAENFIHLFTFTSLGAPAAFKFFDKTIDRKRYTSTKECLDATLIHQSI | |
| | TGLYETRIDLSQLGGD | |
| CasEnd-142 | MDKKYSIGLDIGTNSVGWAVITDEYKVPSKKFKVLGNTDRHSIKKNLIGALL | 102 |
| | FDSGETAEATRLKRTARRRYTRRKNRIRYLQEIFSSEMAKVDDSFFHRLEES | |
| | FLVEEDKKHERHPIFGNIVDEVAYHEKYPTIYHLRKKLADSTEKADLRLIYL | |
| | ALAHMIKFRGHFLIEGDLNPDNSDVDKLFIQLVQTYNQLFEENPINESGVDA | |
| | KAILSARLSKSRRLENLIAQLPGQKKNGLFGNLIALSLGLTPNFKSNEDLAE | |
| | DAKLQLSKDTYDEDLDNLLAQIGDQYADLFLAAKNLSDAILLSDILTVNDEI | |
| | TKAPLSASMIKRYDEHHQDLTLLKALVRQQLPEKYKEIFFDQSKNGYAGYID | |
| | GGASQEEFYKYIKPILEKMDGTEELLAKLNREDLLRKQRTFDNGSIPHQIHL | |
| | GELHAILRRQEDFYPFLKDNREKIEKILTFRIPYYVGPLARGNSRFAWMTRK | |
| | SEETITPWNFEEVVDKGASAQAFIERMTNFDKNLPNEKVLPKHSLLYEYFTV | |
| | YNELTKVKYVTEGMRKPEFLSAEQKEAIVDLLFKKNRKVTVKQLKDDYFKKI | |
| | ECFDSVEISGVEDRFNASLGTYHDLLKIIKDKDFLDNEENEDILEDIVLTLT | |
| | LFEDREMIEERLKKYAHLFDKKVLKQLKRRRYTGWGRLSRKLINGIRDKQSG | |
| | KTILDFLKSDGFANRNFMQLIHDDSLTFKEEIQKAQVSGQGDSLHEQIANLA | |
| | GSPAIKKGILQSVKIVDELVKVMGRHKPENIVIEMARENQTTQKGQKNSRER | |
| | MKRIEEGIKELGSQILKEHPVENTQLQNEKLYLYYLQNGRDMYVDQELDINR | |
| | LSDYDVDHIVPQSFLKDDSIDNKVLTRSDKARGKSDNVPSEEVVKKMKNYWR | |
| | QLLNAKLITQRKFDNLTKAERGGLSELDKAGFIKRQLVETRQITKHVAQILD | |
| | SRMNTERDENDKLIREVKIITLKSKLVSDFRKDFQFYKVREINDYHHAHDAY | |
| | LNAVVGTALIKKYPKLESEFVYGDYKVYDVRKMIAKSEQEIGKATAKYFFYS | |
| | NIMNFFKTEITLANGEIRKRPVIETNEETGEIVWDKEKDFATVRKVLSMPQV | |
| | NIVKKTEVQTGGFSKESILPKRNSDKLIARKKDWDTKKYGGFDSPTVAYSVL | |
| | VVAKVEKGKSKKLKSVKELVGITIMERSSFEKDPVAFLEAKGYKDVQKDLII | |
| | KLPKYSLFELENGRKRMLASAGELQKGNELALPSKYVTFLYLASHYEKLKGK | |
| | PEDNEQKQEYVEQHRHYFDEIFEQIIEFSERYILADKNLDKILSLYSKERDK | |
| | SIREQAENFIHLFTLTSLGAPAAFKFFDTTIDRKRYTSTKEILDATLIHQSI | |
| | TGLYETRIDLSQLGGD | |
| CasEnd-143 | MDKKYSIGLDIGTNSVGWAVITDEYKVPSKKFKVLGNTDRHSIKKNLIGALL | 103 |
| | FDSGETAEATRLKRTARRRYTRRKNRICYLQEIFSNEMAKVDDSFFHRLEES | |
| | FLVEEDKRNERHPIFGNIVDEVAYHEKYPTIYHLRKKLADSDEKADLRLVYL | |
| | ALAHMIKFRGHFLIEGDLNSENSDVQKLFIQLVQTYNQLFEENPLNEEGVDA | |
| | EAILSERLSKSRRLENLIAQFPGEKKNGLFGNLIALSLGLTPNFKSNEDLAE | |
| | DAKLQLSKDTYDEDLENLLAQIGDQYADLFLAAKNLSDAILLSDILTVNDES | |
| | TKAPLSASMVKRYDEHHQDLKLLKALVRQQLPEKYKEIFSDKSKNGYAGYID | |
| | GKTSQEEFYKYIKPILEKMDGSEEFLEKINREDFLRKQRTFDNGSIPHQIHL | |
| | QELHAILRRQEKYYPFLKENREKIEKILTFRIPYYVGPLARGNSRFAWMTRK | |
| | SDEKITPWNFDEVVDKEASAEKFIERMTNFDTYLPEEKVLPKHSLLYEKFTV | |
| | YNELTKVKYVTEGMRKPEFFSGEQKQEIFDLLFKKNRKVTVKKLKEDYFKKF | |
| | ECFDIVEISGLEDRFNASLGTYHDLLKIIKDKDFLDNEENEDILEDIVLTLT | |
| | LFEDREMIEKRLKKYADLFDDKVLKQLKRRHYTGWGRLSKKLINGIRDKQSG | |
| | KTILDFLISDGFANRNFMQLIHDDSLTFKEEIEKAQVSGQGDSLHEHIANLA | |
| | GSPAIKKGILQTVKVVDELVKVMGRHKPENIVIEMARENQTTQKGQRNSRER | |
| | LKRIEEAIKELGSKILKEHPVENTQLQNDRLYLYYLQNGKDMYTGEELDIDR | |
| | LSQYDIDHIIPQSFIKDDSIDNKVLVSSAKARGKSDNVPSEEVVKKMKNYWR | |
| | QLLDAKLISQRKFDNLTKAERGGLSELDKAGFIKRQLVETRQITKHVAQILD | |
| | SRMNTKYDENDKLIREVKVITLKSKLVSDFRKDFQFYKVREINNYHHAHDAY | |
| | LNAVVGTALIKKYPKLESEFVYGDYKVYDVRKMIAKSEQEIGKATAKYFFYS | |
| | NIMNFFKTEITLANGEIRKRPLIETNGETGEIVWDKGRDFATVRKVLSMPQV | |
| | NIVKKTEVQTGGFSKESILPKRNSDKLIARKKDWDPKKYGGFDSPTVAYSVL | |
| | VVAKVEKGKSKKLKSVKELLGITIMERSSFEKNPIDFLEAKGYKEVKKDLII | |
| | KLPKYSLFELENGRKRMLASAGELQKGNELALPSKYVNFLYLASHYEKLKGS | |
| | PEDNEQKQLFVEQHKHYLDEIIEQISEFSKRVILADANLDKVLSAYNKHRDK | |
| | PIREQAENIIHLFTLTNLGAPAAFKYFDTTIDRKRYTSTKEVLDATLIHQSI | |
| | TGLYETRIDLSQLGGD | |
| CasEnd-144 | MDKKYSIGLDIGTNSVGWAVITDEYKVPSKKFKVLGNTDRHSIKKNLIGALL | 104 |
| | FDSGETAEATRLKRTARRRYTRRKNRICYLQEIFSNEMAKVDDSFFHRLEES | |
| | FLVEEDKRNDRHPIFGNIVEEVAYHEKYPTIYHLRKHLADSPEKADLRLVYL | |
| | ALAHIIKFRGHFLIEGDLDAENTDVQKLFKQLVEAYNQTFEESHLEIETVDA | |
| | KSILTEKLSKSRRLENLIAKFPGEKKNGLFGNLIALSLGLTPNFKSNFDLSE | |
| | DAKLQFSKDTYDEDLEELLGQIGDDYADLFDAAKNLYDAILLSGILTVDDNS | |
| | TKAPLSASMVKRYDEHHQDLTLLKEFVREKLPEKYKEIFFDQSKNGYAGYID | |
| | GGASQEDFYKYLKKLLEKIDGSEEFLDKIDREDFLRKQRTFDNGSIPHQIHL | |
| | QELKAIIRRQEEYYPFLKENKEKIEKILTFRIPYYVGPLARGNSRFAWMERK | |
| | SDETITPWNEDDIVDKEKSAEKFIERMTNFDKNLPEEKVLPKHSLLYEKFTV | |
| | YNELTKVKYVTEGGKKPKFFDANQKQEIVDNLFKKYRKVTKKQLLEYLAKEF | |
| | DEFRIVDISGVEDRFNASLGTYHDLKKILGDKSFLDDDKNEEILEDIILTLT | |
| | LFEDREMIKKRLEKYSDLFDKKQIKKLSRRRYTGWGRLSKKLINGIRDKQSG | |
| | KTILDYLIDDGYANRNFMQLIHDDSLSFKEEIEKAQVIGDGDSLHEHIANLA | |
| | GSPAIKKGILQTVKVVDELVKVMGRHKPENIVIEMARENQTTQKGQKNSRER | |
| | MKRIEEGIKELGSQILKEHPVENTQLQNEKLYLYYLQNGRDMYVDQELDINR | |
| | LSDYDVDHIVPQSFLKDDSIDNKVLTRSDKARGKSDNVPSEEVVKKMKNYWR | |
| | QLLNAKLITQRKFDNLTKAERGGLSELDKAGFIKRQLVETRQITKHVAQILD | |
| | SRMNTKYDENDKLIREVKVITLKSKLVSDFRKDFQFYKVREINNYHHAHDAY | |
| | LNAVVGTALIKKYPKLESEFVYGDYKVYDVRKMIAKSEQEIGKATAKYFFYS | |
| | NIMNFFKTEITLANGEIRKRPLIETNGETGEIVWDKGRDFATVRKVLSMPQV | |
| | NIVKKTEVQTGGFSKESILPKRNSDKLIARKKDWDPKKYGGFDSPTVAYSVL | |
| | VVAKVEKGKSKKLKSVKELLGITIMERSSFEKNPIDFLEAKGYKEVKKDLII | |
| | KLPKYSLFELENGRKRMLASAGELQKGNELALPSKYVNFLYLASHYEKLKGS | |
| | PEDNEQKQLFVEQHKHYLDEIIEQISEFSKRVILADANLDKVLSAYNKHRDK | |
| | PIREQAENIIHLFTLTNLGAPAAFKYFDTTIDRKRYTSTKEVLDATLIHQSI | |
| | TGLYETRIDLSQLGGD | |
| CasEnd-145 | MDKKYSIGLDIGTNSVGWAVITDEYKVPSKKFKVLGNTDRHSIKKNLIGALL | 105 |
| | FDSGETAEATRLKRTARRRYTRRKNRIRYLQEIFSEEMAKVDDSFFHRLEES | |
| | FLVEEDKKNERHPIFGNIVDEVAYHEKYPTIYHLRKKLVDSDEKADLRLIYL | |
| | ALAHMIKFRGHFLIEGDLNSDNSDVQKLFEQLVQTYNQLFEENPIEAEGVDA | |
| | KAILSEKLSKSRRLENLIAQLPGEKKNGLFGNLIALSLGLTPNFKSNFDLAE | |
| | DAKLQLSKDTYDDDLENLLAQIGDQYADLFLAAKNLSDAILLSDILRVNTEI | |
| | TKAPLSASMIKRYDEHHQDLTLLKALVRQQLPEKYKEIFFDQSKNGYAGYID | |
| | GGASQEEFYKYIKPILEKMDGTEELLAKLNREDLLRKQRTFDNGSIPHQIHL | |
| | GELHAILRRQEKYYPFLKENREKIEKILTFRIPYYVGPLARGNSRFAWMTRK | |
| | SDETITPWNFEEVVDKGASAQKFIERMTNFDKNLPNEKVLPKHSLLYEYFTV | |
| | YNELTKVKYVTEGMRKPEFLDGEQKKEIVDLLFKKNRKVTVKQLKEDYFKKF | |
| | ECFDSVEISGVEDRFNASLGTYHDLLKIIKDKDFLDNEENEDILEDIVLTLT | |
| | LFEDREMIKERLEKYANLFDKKVMKQLKRRRYTGWGRLSKKLINGIRDKQSG | |
| | KTILDFLKADGFANRNFMQLIHDDSLTFKDEIEKAQVIGKGDSLHEHIANLA | |
| | GSPAIKKGILQTVKVVDELVKVMGRHKPENIVIEMARENQTTQKGQKNSRER | |
| | MKRIEEGIKELGSQILKEHPVENTQLQNEKLYLYYLQNGRDMYVDQELDINR | |
| | LSDYDVDHIVPQSFLKDDSIDNKVLTRSDKARGKSDNVPSEEVVKKMKNYWR | |
| | QLLNAKLITQRKFDNLTKAERGGLSELDKAGFIKRQLVETRQITKHVAQILD | |
| | SRMNTEYDENDKLIRDVKVITLKSKLVSDFRKDFGFYKVREINNYHHAHDAY | |
| | LNAVVGTALIKKYPKLESEFVYGDYKVYDVRKMIAKSEQEIGKATAKYFFYS | |
| | NIMNFFKTEITLANGEIRKRPLIETNEETGEIVWDKEKDFATVRKVLSMPQV | |
| | NIVKKTEVQTGGFSKESILPKRNSDKLIARKKDWDPKKYGGFDSPTVAYSVL | |
| | VVAKVEKGKAKKLKTVKELLGITIMERSSFEKNPVAFLEAKGYQEVKKDLII | |
| | KLPKYSLFELENGRKRMLASAGELQKGNELALPSKYVNFLYLASHYEKLKGS | |
| | PEDNEQKQLFVEQHKEYLDEIIEQISEFSKRVILADANLEKVKSAYEKHEDK | |
| | SIEEQAENIIHLFTLTNLGAPAAFKYFDTTIDRKRYTSTKEVLNATLIHQSI | |
| | TGLYETRIDLSQLGGD | |
| CasEnd-146 | MDKKYSIGLDIGTNSVGWAVITDEYKVPSKKFKVLGNTDRHSIKKNLIGALL | 106 |
| | FDSGETAEATRLKRTARRRYTRRKNRIRYLQEIFSEEMAKVDDSFFHRLEES | |
| | FLVEEDKKHERHPIFGNIVDEVAYHEKYPTIYHLRKKLADSTEKADLRLIYL | |
| | ALAHMIKFRGHFLIEGDLNPENSDVDKLFIQLVQTYNQLFEENPINESGVDA | |
| | KAILTAKLSKSRRLENLIAQLPGEKKNGLFGNLIALSLGLTPNFKSNEDLAE | |
| | DAKLQLSKDTYDEDLDNLLAQIGDQYADLFLAAKNLSDAILLSDILTVNDEI | |
| | TKAPLSASMIKRYDEHHQDLTLLKALVRQQLPEKYKEIFFDPSKNGYAGYID | |
| | GGASQEEFYKFIKPILEKMDGTEELLAKLNREDFLRKQRTFDNGSIPHQIHL | |
| | GELHAILRRQEDFYPFLKENREKIEKILTFRIPYYVGPLARGNSRFAWMTRK | |
| | SEETITPWNFEEVVDKGASAQAFIERMTNFDKNLPNEKVLPKHSLLYEYFTV | |
| | YNELTKVKYVTEGMRKPEFLSGEQKEEIVDLLFKTNRKVTVKQLKEDYFKKI | |
| | ECFDSVEISGVEDRFNASLGTYHDLLKIIKDKDELDNEENEDILEDIVLTLT | |
| | LFEDREMIEERLEKYAHLFDKKVLKQLKRRRYTGWGRLSRKLINGIRDKQSG | |
| | KTILDFLKSDGFANRNFMQLIHDDSLTFKEEIQKAQVIGQGDSLHEQIANLA | |
| | GSPAIKKGILQTVKIVDELVKVMGRHKPENIVIEMARENQTTQKGQKNSRER | |
| | MKRIEEGIKELGSQILKEHPVENTQLQNEKLYLYYLQNGRDMYVDQELDINR | |
| | LSDYDVDHIVPQSFLKDDSIDNKVLTRSDKARGKSDNVPSEEVVKKMKNYWR | |
| | QLLNAKLITQRKFDNLTKAERGGLSELDKAGFIKRQLVETRQITKHVAQILD | |
| | SRMNTERDENDKLIREVKIITLKSKLVSDFRKDFQFYKVREINNYHHAHDAY | |
| | LNAVVGTALIKKYPKLESEFVYGDYKVYDVRKMIAKSEQEIGKATAKYFFYS | |
| | NIMNFFKSEITLANGTIRKRPLIETNEETGEIVWDKGKDFATVRKVLSMPQV | |
| | NIVKKTEVQTGGFSKESILPKRNSDKLIARKKDWDTKKYGGFDSPTVAYSVL | |
| | VVAKVEKGKSKKLKTVKELVGITIMERSSFEKDPVAFLEAKGYKEVQKDLII | |
| | KLPKYSLFELENGRKRLLASAGELQKGNELALPGKYVILLYLASNYEKLKGK | |
| | PEDNEQKLEYVEQHRHYFDEIVDQISEFSERYILADANLSKILSLYNEHRDK | |
| | PIREQAENFIHLFTFTSLGAPAAFKFFDTTIDRKRYTSTSEILNATLIHQSI | |
| | TGLYETRIDLSQLGGD | |
| CasEnd-147 | MDKKYSIGLDIGTNSVGWAVITDEYKVPSKKFKVLGNTDRHSIKKNLIGALL | 107 |
| | FDSGETAEATRLKRTARRRYTRRKNRICYLQEIFSNEMAKVDPSFFQRLEES | |
| | FLVEEDKTGSRHPIFGNIVEEVAYHEKYPTIYHLRKKLVDSDEKADLRLIYL | |
| | ALAHMIKFRGHFLIEGDLNPDNSDVDKLFIQLVQTYNQLFEENPINASGVDA | |
| | KAILSARLSKSRRLENLIAQLPGEKKNGLFGNLIALSLGLTPNFKSNFDLAE | |
| | DAKLQLSKDTYDDDLDNLLAQIGDQYADLFLAAKNLSDAILLSDILRVDIND | |
| | TRAPLSASMIKRYDDHHQDLTKLKELVRKYLPEKYKEIFFDQNSNGYAGYID | |
| | GGATQEEFYKYIKPILESMPGTKDLLKKLENKDLLRKQRTFDNGSIPHQIHL | |
| | GELRAILERQEKFYPFLKENREKIEKILSFRIPYYVGPLARGNSRFAWMTRK | |
| | SEETITPWNFEEVVDKGASAQSFIERMTNFDKNLPNEKVLPKHSLLYEYFTV | |
| | YNELTKVKYVTEGMRKPAFLSGEQKKAIVDLLFKTNRKVTVKQLKEDYFKKI | |
| | ECFDSVEISGVEDRFNASLGTYHDLLKIIKDKDFLDNEENEDILEDIVLTLT | |
| | LFEDREMIEERLKTYAHLFDDKVMKQLKRRRYTGWGRLSRKLINGIRDKQSG | |
| | KTILDFLKSDGFANRNFMQLIHDDSLTFKEDIQKAQVSGQGDSLHEHIANLA | |
| | GSPAIKKGILQTVKVVDELVKVMGRHKPENIVIEMARENQTTQKGQKNSRER | |
| | MKRIEEGIKELGSQILKEHPVENTQLQNEKLYLYYLQNGRDMYVDQELDINR | |
| | LSDYDVDHIVPQSFLKDDSIDNKVLTRSDKARGKSDNVPSEEVVKKMKNYWR | |
| | QLLNAKLITQRKFDNLTKAERGGLSELDKAGFIKRQLVETRQITKHVAQILD | |
| | SRMNTKYDENDKLIREVKVITLKSKLVSDFRKDFQFYKVREINNYHHAHDAY | |
| | LNAVVGTALIKKYPKLESEFVYGDYKVYDVRKMIAKSEQEIGKATAKYFFYS | |
| | NIMNFFKTEITLANGEIRKRPLIETNGETGEIVWDKGRDFATVRKVLSMPQV | |
| | NIVKKTEVQTGGFSKESILPKRDSDKLIARKKDWDPKKYGGFDSPTVAYSVL | |
| | VVAKKEKGKKKKLVKVKELLGITIMERSKFEKDPLGFLESKGYKDVKEDEII | |
| | KLPKYSLFELGNGRKRMLASAGELQKGNELALPSEYVNFLYLASNYEKLKGD | |
| | PKKQEEKQKYVEKNKEYLDKIIEQISEFSRRVIKADANLEKVLKAYEKHKDK | |
| | PISEQAENIIHLFTLTALGAPAAFKYFDEVIDRKRYTSTKEVLDATLIHQSI | |
| | TGLYETRIDLSFLGGD | |
| CasEnd-148 | MDKKYSIGLDIGTNSVGWAVITDEYKVPSKKFKVLGNTDRHSIKKNLIGALL | 108 |
| | FDSGETAEATRLKRTARRRYTRRKNRICYLQEIFSNEMAKVDDSFFHRLEES | |
| | FLVEEDKKHERHPIFGNIVDEVAYHEKYPTIYHLRKKLADSTEKADLRLIYL | |
| | ALAHIIKFRGHFLIEGDLNSDNSDVQKLFIQLVQTYNQLFEENPINEEGVDA | |
| | KAILSAKLSKSRRLENLIAQLPGEKKNGLFGNLIALSLGLTPNFKSNFDLAE | |
| | DAKLQLSKDTYDEDLDNLLAQIGDQYADLFLAAKNLSDAILLSDILTVNSEI | |
| | TKAPLSASMIKRYDEHHQDLTLLKALVRQQLPEKYKEIFFDESKNGYAGYID | |
| | GGASQEEFYKYIKPILEKMDGTEYLLAKLNREDFLRKQRTFDNGSIPHQIHL | |
| | GELHAILRRQEDFYPFLKENREKIEKILTFRIPYYVGPLARGNSRFAWMTRK | |
| | SDETITPWNFEEVVDKEASAQAFIERMTNFDKNLPNEKVLPKHSLLYEYFTV | |
| | YNELTKVKYVTEGMGKPEFLSAEQKQEIVDLLFKKNRKVTVKQLKEFLFKEI | |
| | ECFDSVEISGVEDAFNASLGTYHDLLKIIKDKDELDNEENEDILEDIILTLT | |
| | LFEDREMIEERLKKYANLFDKKVLKQLKRRRYTGWGRLSKKLINGIRDKQSG | |
| | KTILDFLKSDGFANRNFMQLIHDDSLTFKEEIQKAQVSGQGDSLHEHIANLA | |
| | GSPAIKKGILQTVKVVDELVKVMGRHKPENIVIEMARENQTTQKGQKNSRER | |
| | MKRIEEGIKELGSQILKEHPVENTQLQNEKLYLYYLQNGRDMYVDQELDINR | |
| | LSDYDVDHIVPQSFLKDDSIDNKVLTRSDKARGKSDNVPSEEVVKKMKNYWR | |
| | QLLNAKLITQRKFDNLTKAERGGLSELDKAGFIKRQLVETRQITKHVAQILD | |
| | SRMNTKYDENDKLIREVKVITLKSKLVSDFRKDFQFYKVREINNYHHAHDAY | |
| | LNAVVGTALIKKYPKLESEFVYGDYKVYDVRKMIAKSEQEIGKATAKYFFYS | |
| | NIMNFFKTEITLANGEIRKRPLIETNGETGEIVWDKGRDFATVRKVLSMPQV | |
| | NIVKKTEVQTGGFSKESILPKRNSDKLIARKKDWDTKKYGGFDSPTVAYSVL | |
| | VVAKVEKGKSKKLKTVKELVGITIMERSSFEKDPIAFLEAKGYKNIQEDLII | |
| | KLPKYSLFELENGRKRLLASAGELQKGNELALPQKYVTFLYLASHYEKLKGK | |
| | PEDEEQKQLYVEQHRHYFDEILEQISEFSERYILADKNLEKIKELYNKFEDY | |
| | SISELAESFINLFTLTALGAPAAFKFFDTTIDRKRYTSTKEILNATLIHQSI | |
| | TGLYETRIDLSQLGGD | |
| CasEnd-149 | MDKSYSIGLDIGTNSVGWAVITDEYKVPSKKFKVLGNTDRHSIKKNLLGALL | 109 |
| | FDSGETAEATRLKRTARRRYTRRKNRIRYLQEIFAEEMAKVDDSFFHRLEES | |
| | FLVEEDKRHERHPIFGNIVDEVAYHENYPTIYHLRKHLADSTEKADLRLIYL | |
| | ALAHIIKFRGHFLIEGDLNAENTDVQKLFIQLVQTYNQLFEESPINEEGVDA | |
| | KAILTAKLSKSRRLENLIKQIPGEKKNGLFGNLIALSLGLTPNFKSNEDLAE | |
| | DAKLQLSKDTYDEDLDNLLAQIGDQYADLFLAAKNLSDAILLSDILTVNTEI | |
| | TKAPLSASMIKRYDEHHQDLTLLKKLVREQLPEKYKEIFFDESKNGYAGYID | |
| | GGASQEDFYKYIKPILEKLDGTEEFLAKINREDFLRKQRTFDNGSIPHQIHL | |
| | GELHAILRRQEDFYPFLKENKEKIEKILTFRIPYYVGPLARGNSRFAWLTRK | |
| | SDETITPWNFEEVVDKEASAQAFIERMTNFDKNLPEEKVLPKHSLLYEYFTV | |
| | YNELTKVKYITEGMRKPAFLSSEQKKEIVDLLFKKNRKVTVKQLKEFYFKKI | |
| | ECFDSVEISGVEDRFNASLGTYHDLLKIIKDKDFLDNEENEDILEDIVLTLT | |
| | LFEDREMIEKRLSKYADLFDKKVLKQLKRRRYTGWGRLSAKLINGIRDKQSG | |
| | KTILDFLKDDGFANRNFMQLIHDDSLTFKEEIQKAQVIGQGDSLHEQIANLA | |
| | GSPAIKKGILQSIKIVDELVKVMGRHKPENIVIEMARENQTTQKGQKNSRER | |
| | LKRLEEGIKKLGSQILKEHPVENTQLQNDKLYLYYLQNGKDMYTGEELDIDR | |
| | LSDYDVDHIIPQSFIKDDSIDNKVLTSSAKARGKSDNVPSEEVVKKMKSYWR | |
| | QLLNAKLISQRKFDNLTKAERGGLSELDKAGFIKRQLVETRQITKHVAQILD | |
| | SRFNTKYDENDKLIREVKIITLKSKLVSDFRKDFGFYKVREINDYHHAHDAY | |
| | LNAVVGTALIKKYPKLESEFVYGDYKVYDSRKMIAKSEQEIGKATAKYFFYS | |
| | NIMNFFKTEITLANGEIRKRPLIETNEETGEIVWDKEKDFATVRKVLSMPQV | |
| | NIVKKTEVQTGGFSKESILPKRNSDKLIARKKDWDTKKYGGFDSPTVAYSVL | |
| | VVADVEKGKSKKLKTVKELVGITIMERSSFEKNPIAFLEAKGYKNIQKDLII | |
| | KLPKYSLFELENGRKRLLASAGELQKGNELALPQKYVTLLYHAKHYEKLKES | |
| | PEDNEKHLEYVEQHRHEFDEIFDQISEFSERYILADKNLEKIKELYNKNEDK | |
| | DISELAESFINLFTFTALGAPAAFKFFDTTIDRKRYTSTTEILNATLIHQSI | |
| | TGLYETRIDLSQLGGD | |
| CasEnd-150 | MKKKYSIGLDIGTNSVGWAVITDEYKVPSKKFKVLGNTDRQSIKKNLLGALL | 110 |
| | FDSGETAEATRLKRTARRRYTRRKNRIRYLQEIFAEEMAKVDDSFFHRLEES | |
| | FLVEEDKRHERHPIFGNIVDEVAYHENYPTIYHLRKKLADSTEKADLRLIYL | |
| | ALAHIIKFRGHFLIEGDLNPENTDVQKLFIQLVQTYNQLFEENPLSEEGVDA | |
| | KAILTAKLSKSRRLENLIAQIPGEKKNGLFGNLIALSLGLTPNFKSNFDLAE | |
| | DAKLQLSKDTYDEDLDNLLAQIGDQYADLFLAAKNLSDAILLSDILTVNSEI | |
| | TKAPLSASMIKRYDEHHQDLTLLKALVRQQLPEKYKEIFFDQTKNGYAGYID | |
| | GGASQEEFYKFIKPILEKLDGSEELLAKINREDFLRKQRTFDNGSIPHQIHL | |
| | GELHAILRRQEDFYPFLKENREKIEKILTFRIPYYVGPLARGNSRFAWLTRK | |
| | SDETITPWNFEEVVDKEASAQAFIERMTNFDKNLPNEKVLPKHSLLYEYFTV | |
| | YNELTKVKYVTEGMRKPEFLSAEQKEEIVDLLFKTNRKVTVKQLKEDLFKKI | |
| | ECFDSVEISGVEDRFNASLGTYHDLLKIIKDKDFLDNEENEDILEDIVLTLT | |
| | LFEDREMIENRLEKYADLFDKKVLKQLKRRRYTGWGRLSRKLINGIRDKQSG | |
| | KTILDFLKDDGFANRNFMQLIHDDSLTFKEEIKKAQVIGQGDSLHEQIANLA | |
| | GSPAIKKGILQSVKIVDELVKVMGRHKPENIVIEMARENQTTQKGQKNSRER | |
| | MKRIEEGIKELGSQILKEHPVENTQLQNEKLYLYYLQNGRDMYVDQELDINR | |
| | LSDYDVDHIVPQSFLKDDSIDNKVLTRSDKARGKSDNVPSEEVVKKMKNYWR | |
| | QLLNAKLITQRKFDNLTKAERGGLSELDKAGFIKRQLVETRQITKHVAQILD | |
| | SRENTERDENDKLIREVKIITLKSKLVSDFRKDFQFYKVREINNYHHAHDAY | |
| | LNAVVGTALIKKYPKLESEFVYGDYKVYDVRKMIAKSEQEIGKATAKYFFYS | |
| | NIMNFFKTEITLANGEIRKRPLIETNEETGEIVWDKEKDFATVRKVLSMPQV | |
| | NIVKKTEVQTGGFSKESILPKRNSDKLIARKKDWDTKKYGGFDSPTVAYSVL | |
| | VVAKIEKGKAKKLKTVKELVGITIMERSSFEKDPVAFLEAKGYKNIQKDLII | |
| | KLPKYSLFELENGRKRLLASAGELQKGNELALPQKYVTLLYLASHYEKLKGK | |
| | PEDLEKKLEYVEQHRDEFDEIFEQISEFSERYILADKNLEKIKELYKEFRDK | |
| | SIEELAENFIHLFTFTALGAPAAFKFFDKTIDRKRYTSTTEILNATLIHQSI | |
| | TGLYETRIDLSKLGGD | |
| CasEnd-151 | MDKKYSIGLDIGTNSVGWAVITDEYKVPSKKFKVLGNTDRQSIKKNLIGALL | 111 |
| | FDSGETAEATRLKRTARRRYTRRKNRIRYLQEIFAEEMAKVDDSFFHRLEES | |
| | FLVEEDKKHERHPIFGNIVDEVAYHEKYPTIYHLRKKLADSTEKADLRLIYL | |
| | ALAHMIKFRGHFLIEGDLNSDNSDVDKLFIQLVQTYNQLFEENPINESGVDA | |
| | KAILSARLSKSRRLENLIAQLPGEKKNGLFGNLIALSLGLTPNFKSNFDLAE | |
| | DAKLQLSKDTYDDDLENLLAQIGDQYADLFLAAKNLSDAILLSDILTVNSEI | |
| | TKAPLSASMIKRYDEHHQDLTLLKALVRQQLPEKYKEIFFDQSKNGYAGYID | |
| | GGASQEEFYKFIKPILEKMDGTEELLAKLNREDFLRKQRTFDNGSIPHQIHL | |
| | GELHAILRRQEDFYPFLKENREKIEKILTFRIPYYVGPLARGNSRFAWMTRK | |
| | SEETITPWNFEEVVDKGASAQAFIERMTNFDKNLPNEKVLPKHSLLYEYFTV | |
| | YNELTKVKYVTEGMRKPEFLSGEQKKAIVDLLFKKNRKVTVKQLKEDYFKKI | |
| | ECFDSVEISGVEDRFNASLGTYHDLLKIIKDKDFLDNEENEDILEDIVLTLT | |
| | LFEDREMIEERLKKYANLFDDKVLKQLKRRRYTGWGRLSRKLINGIRDKQSG | |
| | KTILDFLKSDGFANRNFMQLIHDDSLTFKEAIQKAQVSGQGDSLHEQIANLA | |
| | GSPAIKKGILQTVKIVDELVKVMGRHKPENIVIEMARENQTTQKGQKNSRER | |
| | MKRIEEGLKELGSQILKEHPVENTQLQNEKLYLYYLQNGKDMYTGQELDIDR | |
| | LSDYDVDHIIPQSFIKDDSIDNKVLTSSKEARGKSDNVPSEEVVKKMKNYWR | |
| | QLLKAKLISQRKFDNLTKAERGGLTELDKAGFIKRQLVETRQITKHVAQILD | |
| | SRMNTEYDENDKLIRKVKIITLKSKLVSDFRKDFQFYKVREINNYHHAHDAY | |
| | LNAVVGTALIKKYPKLESEFVYGDYKVYDVRKMIAKSEQEIGKATAKRFFYS | |
| | NIMNFFKTEIKLANGEIRKRPLIETNEETGEIVWDKEKDFATVRKVLSMPQV | |
| | NIVKKTEVQTGGFSKESILPKRNSDKLIARKKDWDPKKYGGFDSPTVAYSVL | |
| | VVAKVEKGKSKKLKSVKELVGITIMERSSFEKDPVDFLEAKGYKEIQKDLII | |
| | KLPKYSLFELENGRKRMLASAGELQKGNELALPSKYVKFLYLASHYEKLKGS | |
| | PEDNEQKQLYVEQHKHYFDEIVDQISEFSERYILADANLDKILSAYNKHRDK | |
| | SIREQAENIINLETLTNLGAPAAFKFFDTTIDRKRYTSTKEILDATLIHQSI | |
| | TGLYETRIDLSQLGGD | |
| CasEnd-152 | MDKKYSIGLDIGTNSVGWAVITDEYKVPSKKFKVLGNTDRHSIKKNLIGALL | 112 |
| | FDSGETAEATRLKRTARRRYTRRKNRIRYLQEIFSEEMAKVDDSFFHRLEES | |
| | FLVEEDKRNERHPIFGNIVDEVAYHEKYPTIYHLRKKLADSDEKADLRLIYL | |
| | ALAHMIKFRGHFLIEGDLNSDNSDVDKLFIQLVQTYNQLFEENPINEEGVDA | |
| | KAILSEKLSKSRRLENLIAQFPGEKKNGLFGNLIALSLGLTPNFKSNEDLAE | |
| | DAKLQLSKDTYDDDLENLLAQIGDQYADLFLAAKNLSDAILLSDILTVNDEI | |
| | TKAPLSASMVKRYDEHHQDLTLLKKLVRQQLPEKYKEIFFDQSKNGYAGYID | |
| | GGASQEEFYKYLKPILEKMDGTEELLDKIEREDFLRKQRTFDNGSIPHQIHL | |
| | GELHAILRRQEKYYPFLKDNREKIEKILTFRIPYYVGPLARGNSRFAWMTRK | |
| | SDETITPWNFEEVVDKGASAQSFIERMTNFDKNLPNEKVLPKHSLLYEKFTV | |
| | YNELTKVKYVTEGMRKPAFLSAEQKQEIVDLLFKKNRKVTVKQLKEDYFKKF | |
| | ECFDSVEISGVEDRFNASLGTYHDLLKIIKDKDFLDNEENEDILEDIVLTLT | |
| | LFEDREMIEKRLKKYANLFDDKVLKKLKRRRYTGWGRLSKKLINGIRDKQSG | |
| | KTILDFLKSDGFANRNFMQLIHDDSLTFKEEIQKAQVSGQGESLHELIANLA | |
| | GSPAIKKGILQTLKIVDELVKVMGRHKPENIVIEMARENQTTQKGQKNSRER | |
| | MKRIEEGIKELGSQILKEHPVENTQLQNEKLYLYYLQNGRDMYVDQELDINR | |
| | LSDYDVDHIVPQSFLKDDSIDNKVLTRSDKARGKSDNVPSEEVVKKMKNYWR | |
| | QLLNAKLITQRKFDNLTKAERGGLSELDKAGFIKRQLVETRQITKHVAQILD | |
| | SRFNTKYDENDKLIRDVKIITLKSKLVSDFRKDFQFYKVREINNYHHAHDAY | |
| | LNAVVGTALIKKYPKLESEFVYGDYKVYDVRKMIAKSEQEIGKATAKYFFYS | |
| | NIMNFFKTEITLANGEIRKRPLIETNEETGEIVWDKEKDFATVRKVLSMPQV | |
| | NIVKKTEVQTGGFSKESILPKRNSDKLIARKKDWDPKKYGGFDSPTVAYSVL | |
| | VIAKVEKGKAKKLKTVKELVGITIMERSSFEKNPIAFLEDKGYKEVKKDLII | |
| | KLPKYSLFELENGRKRLLASAGELQKGNELALPSKYVTLLYLASHYEKLKGS | |
| | PEDNEQKQLFVEQHKHYFDEILDQISEFSKRVILADANLEKIKSLYDKNRDA | |
| | SIEEQAENFIHLFTFTNLGAPAAFKFFDTTIDRKRYTSTKEILNATLIHQSI | |
| | TGLYETRIDLSQLGGD | |
| CasEnd-153 | MDKKYSIGLDIGTNSVGWAVITDEYKVPSKKFKVLGNTDRHSIKKNLIGALL | 113 |
| | FDSGETAEATRLKRTARRRYTRRKNRICYLQEIFSNEMAKVDENFFQRLEES | |
| | FLVEEDKRGERHPIFGNIVEEVAYHEKYPTIYHLRKHLADSDEKADLRLVYL | |
| | ALAHIIKFRGHFLIEGDLDAENTDVQKLFKQLVETYDRTFEESPLEEFTVDA | |
| | ESILTEKLSKSRRLENLIAQFPGEKKNGLFGNFIALSLGLTPNFKSNEDLSE | |
| | DAKLQFSKDTYDEDLEELLGQIGDDYADLFLAAKNLYDAILLSGILTVDDNS | |
| | TKAPLSASMVKRYDEHHQDLTELKAFIRKQLPEKYKEIFFDQSKNGYAGYID | |
| | GGASQEEFYKYLKKILEKIDGSEEFLDKIEREDFLRKQRTFDNGSIPHQIHL | |
| | QELHAIIRRQEEYYPFLKENQEKIEKILTFRIPYYVGPLARGNSRFAWLSRK | |
| | SDETITPWNFDDVVDKEKSAEDFIERMTNFDKNLPEEKVLPKHSLLYEKFTV | |
| | YNELTKVKYVTEGGRKPKFFDANMKQEIFDELFKKYRKVTKKQLLDYLVKEF | |
| | EEFRIVDISGVEDRFNASLGTYHDLKKILGDKDFLDNDENEEILEDIVLTLT | |
| | LFEDREMIKKRLEKYSDLFDKKQLKKLCRRRYTGWGRLSAKLINGIRDKETG | |
| | KTILDYLIDDGEANRNFMQLIHDDNLSFKEEIEKAQVIGDEDSLHEHIANLA | |
| | GSPAIKKGILQTVKVVDELVKVMGRHKPENIVIEMARENQTTQKGQKNSRER | |
| | MKRIEEGIKELGSQILKEHPVENTQLQNEKLYLYYLQNGRDMYVDQELDINR | |
| | LSDYDVDHIVPQSFLKDDSIDNKVLTRSDKARGKSDNVPSEEVVKKMKNYWR | |
| | QLLNAKLITQRKFDNLTKAERGGLSELDKAGFIKRQLVETRQITKHVAQILD | |
| | SRMNTKYDENDKLIREVKVITLKSKLVSDFRKDFQFYKVREINNYHHAHDAY | |
| | LNAVVGTALIKKYPKLESEFVYGDYKVYDVRKMIAKSEQEIGKATAKYFFYS | |
| | NIMNFFKTEITLANGEIRKRPLIETNGETGEIVWDKGRDFATVRKVLSMPQV | |
| | NIVKKTEVQTGGFSKESILPKRNSDKLIARKKDWDPKKYGGFDSPTVAYSVL | |
| | VVAKVEKGKSKKLKSVKELLGITIMERSSFEKNPIDFLEAKGYKEVKKDLII | |
| | KLPKYSLFELENGRKRMLASAGELQKGNELALPSKYVNFLYLASHYEKLKGS | |
| | PEDNEQKQLFVEQHKHYLDEIIEQISEFSKRVILADANLDKVLSAYNKHRDK | |
| | PIREQAENIIHLFTLTNLGAPAAFKYFDTTIDRKRYTSTKEVLDATLIHQSI | |
| | TGLYETRIDLSQLGGD | |
| CasEnd-154 | MDKKYSIGLDIGTNSVGWAVITDEYKVPSKKFKVLGNTDRHSIKKNLIGALL | 114 |
| | FDSGETAEATRLKRTARRRYTRRKNRICYLQEIFSNEMAKVDDSFFHRLEES | |
| | FLVEEDKKHERHPIFGNIVDEVAYHEKYPTIYHLRKKLVDSTDKADLRLIYL | |
| | ALAHMIKFRGHFLIEGDLNPDNSDVQKLFKQLVQTYNQLFEEKPLDEETVDA | |
| | KAILSARLSKSRRLENLIAQFPGEKKNGLFGNLIALSLGLTPNFKSNFDLAE | |
| | DAKLQLSKDTYDEDLENLLGQIGDQYADLFVAAKNLSDAILLSGILTVNTEI | |
| | TKAPLSASMIKRYDEHHQDLTLLKALVRQQLPEKYKEIFFDQSKNGYAGYID | |
| | GGASQEEFYKFIKPILEKMDGTEELLVKLNREDLLRKQRTFDNGSIPHQIHL | |
| | GELHAILRRQEDFYPFLKDNREKIEKILTFRIPYYVGPLARGNSRFAWMTRK | |
| | SEETITPWNFEEVVDKGASAQSFIERMTNFDKNLPNEKVLPKHSLLYEYFTV | |
| | YNELTKVKYVTEGMRKPAFLSGEQKKAIVDLLFKTNRKVTVKQLKEDYFKKI | |
| | ECFDSVEISGVEDRFNASLGTYHDLLKIIKDKDFLDNEENEDILEDIVLTLT | |
| | LFEDREMIEERLKTYAHLFDDKVMKQLKRRRYTGWGRLSRKLINGIRDKQSG | |
| | KTILDFLKSDGFANRNFMQLIHDDSLTFKEDIQKAQVSGQGDSLHEHIANLA | |
| | GSPAIKKGILQTVKVVDELVKVMGRHKPENIVIEMARENQTTQKGQKNSRER | |
| | MKRIEEGIKELGSQILKEHPVENTQLQNEKLYLYYLQNGRDMYVDQELDINR | |
| | LSDYDVDHIVPQSFLKDDSIDNKVLTRSDKARGKSDNVPSEEVVKKMKNYWR | |
| | QLLNAKLITQRKFDNLTKAERGGLSELDKAGFIKRQLVETRQITKHVAQILD | |
| | SRMNTKYDENDKLIREVKVITLKSKLVSDFRKDFQFYKVREINNYHHAHDAY | |
| | LNAVVGTALIKKYPKLESEFVYGDYKVYDVRKMIAKSEQEIGKATAKYFFYS | |
| | NIMNFFKTEITLANGEIRKRPLIETNGETGEIVWDKGRDFATVRKVLSMPQV | |
| | NIVKKTEVQTGGFSKESILPKRDSDKLIARKKDWDTKKYGGFDSPTVAYSVL | |
| | VIAKVEKGKAKKLKTVKELVGITIMERSAFEKDPVAFLEAKGYKNIQKDLII | |
| | KLPKYSLFELENGRKRLLASAGELQKGNELALPQKYVTLLYHAKNYEKLKGS | |
| | PEDEKEKLLYIEEHREEFDEIFDQISEFSKRYILADANLEKIKELYEQNKDA | |
| | SIEELASSFINLLTFTALGAPAAFKFFDTTIDRKRYTSTKEILNATLIHQSI | |
| | TGLYETRIDLSQLGGD | |
| CasEnd-155 | MKKKYSIGLDIGTNSVGWAVITDEYKVPSKKFKVLGNTDRQSIKKNLLGALL | 115 |
| | FDSGETAEATRLKRTARRRYTRRKNRIRYLQEIFAEEMAKVDDSFFQRLEES | |
| | FLVEEDKRHERHPIFGNIVDEVAYHEKYPTIYHLRKELADSTEKADLRLIYL | |
| | ALAHMIKFRGHFLIEGDLNSENSDVDKLFIQLVQTYNQLFEENPLNEETVDA | |
| | KAILSAKLSKSRRLENLIAQFPNQKKNGLFGNLIALSLGLTPNFKSNFDLSE | |
| | DAKLQLSKDTYDEDLDELLGQIGDQYADLFLAAKNLSDAILLSGILTVNDEI | |
| | TKAPLSASMIKRYDEHHQDLTLLKALVREQLPEKYKEIFFDKSKNGYAGYID | |
| | GGASQEEFYKYIKPILEKIDGTEYFLDKINREDFLRKQRTEDNGSIPHQIHL | |
| | GELHAILRRQEDFYPFLKENREKIEKILTFRIPYYVGPLARGNSRFAWMSRK | |
| | SDETITPWNFEEVVDKEASAQSFIERMTNFDKNLPEEKVLPKHSLLYEYFTV | |
| | YNELTKVKYVTEGMGKPEFFSGEQKEEIVDLLFKKNRKVTVKQLKEDLFKEI | |
| | ECFDIVEISGVEDRFNASLGTYHDLLKIIKDKDFLDNEENEDILEDIVLTLT | |
| | LFEDREMIEERLKKYAHLFDKKVLKKLKRRRYTGWGRLSKKLINGIRDKQSG | |
| | KTILDFLKDDGFANRNFMQLIHDDSLTFKEEIQKAQVIGQGDSLHEVIANLA | |
| | GSPAIKKGILQSVKIVDELVKVMGRHKPENIVVEMARENQTTQKGQKNSRER | |
| | LKRLEEGIKELGSQILKEHPVENTQLQNDKLYLYYLQNGKDMYTGEELDIDR | |
| | LSDYDVDHIIPQSFIKDDSIDNKVLTSSAKARGKSDNVPSEEVVKKMKSYWR | |
| | QLLKAKLISQRKFDNLTKAERGGLSELDKAGFIKRQLVETRQITKHVAQILD | |
| | SRFNTKFDENDKLIRDVKIITLKSKLVSDFRKDFQFYKVREINDYHHAHDAY | |
| | LNAVVGTALIKKYPKLESEFVYGDYPVYDVRKMIAKSEQEIGKATAKRFFYS | |
| | NIMNFFKTEIKLADGEIRKRPQIETNEETGEIVWDKEKDFATVRKVLSMPQV | |
| | NIVKKTEVQTGGFSKESILPKRNSDKLIARKKDWDPKKYGGFDSPTVAYSVL | |
| | VVAKVEKGKAKKLKTVKELVGITIMERSSFEKNPIAFLEAKGYKDIQKDLII | |
| | KLPKYSLFELENGRKRMLASAGELQKGNELALPAKYVTLLYLASHYEKLKGS | |
| | PEDNEKKMLFVEQHREYFDEILDQISEFSKRYILADKNLSKILELYNENNDK | |
| | DISEQAESFINLFTFTALGAPAAFKFFDTTIDRKRYTSTKEILDSTLIHQSI | |
| | TGLYETRIDLSQLGGD | |
| CasEnd-156 | MKKSYSIGLDIGTNSVGWAVITDDYKVPSKKMKVLGNTDRQSIKKNLLGALL | 116 |
| | FDSGETAEATRLKRTARRRYTRRKNRICYLQEIFSNEMAKVDDSFFHRLEES | |
| | FLVEEDKKHERHPIFGNIVDEVAYHEKYPTIYHLRKKLVDSTDKADLRLIYL | |
| | ALAHMIKFRGHFLIEGDLNPDNSDVDKLFIQLVQTYNQLFEENPINASGVDA | |
| | KAILSARLSKSRRLENLIAQLPGEKKNGLFGNLIALSLGLTPNFKSNFDLAE | |
| | DAKLQLSKDTYDDDLDNLLAQIGDQYADLFLAAKNLSDAILLSDILRVNTEI | |
| | TKAPLSASMIKRYDEHHQDLTLLKALVRQQLPEKYKEIFFDQSKNGYAGYID | |
| | GGASQEEFYKFIKPILEKMDGTEELLVKLNREDLLRKQRTFDNGSIPHQIHL | |
| | GELHAILRRQEDFYPFLKDNREKIEKILTFRIPYYVGPLARGNSRFAWMTRK | |
| | SEETITPWNFEEVVDKGASAQSFIERMTNFDKNLPNEKVLPKHSLLYEYFTV | |
| | YNELTKVKYVTEGMRKPAFLSGEQKKAIVDLLFKTNRKVTVKQLKEDYFKKI | |
| | ECFDSVEISGVEDRFNASLGTYHDLLKIIKDKDFLDNEENEDILEDIVLTLT | |
| | LFEDREMIEERLKTYAHLFDDKVMKQLKRRRYTGWGRLSRKLINGIRDKQSG | |
| | KTILDFLKSDGFANRNFMQLIHDDSLTFKEDIQKAQVSGQGESLHEQVADLA | |
| | GSPAIKKGILQSIKIVDEIVKVMGRHAPENIVIEMARENQTTAKGQKNSRER | |
| | MKRIEEGIKELGSQILKEHPVENTQLQNEKLYLYYLQNGRDMYVDQELDINR | |
| | LSDYDVDHIVPQSFLKDDSIDNKVLTRSDKARGKSDNVPSEEVVKKMKNYWR | |
| | QLLNAKLITQRKFDNLTKAERGGLTDDDKAGFIKRQLVETRQITKHVAQILD | |
| | SRFNTERDDNNKLIRDVKIITLKSKLVSDFRKDFQLYKVREINDYHHAHDAY | |
| | LNAVVGKALIKKYPKLEPEFVYGDYPKYNSYKLVGKSDKERGKATAKMFFYS | |
| | NIMNFFKSDVKLADGTIIKRPVIEVNEETGEIVWNKEKHIATIKKVLSMPQV | |
| | NIVKKTEVQTGGFSKESILPKRNSDKLIARKKDWDPKKYGGFDSPTVAYSVL | |
| | VVAKVEKGKSKKLKSVKELLGITIMERSSFEKNPIDFLEAKGYKEVKKDLII | |
| | KLPKYSLFELENGRKRMLASAGELQKGNELALPSKYVNFLYLASHYEKLKGS | |
| | PEDNEQKQLFVEQHKHYLDEIIEQISEFSKRVILADANLDKVLSAYNKHRDK | |
| | PIREQAENIIHLFTLTNLGAPAAFKYFDTTIDRKRYTSTKEVLDATLIHQSI | |
| | TGLYETRIDLSQLGGD | |
| CasEnd-157 | MDKKYSIGLDIGTNSVGWAVITDEYKVPSKKFKVLGNTDRKSIKKNLIGALL | 117 |
| | FDSGETAEATRLKRTARRRYTRRKNRIRYLQEIFSEEMAKVDDSFFHRLEES | |
| | FLVEEDKKNERHPIFGNIVDEVAYHEKYPTIYHLRKKLADSTEKADLRLIYL | |
| | ALAHMIKFRGHFLIEGDLNAENSDVQKLFIQLVQTYNQLFEESPLEAEGVDA | |
| | KAILTARLSKSRRLENLIAQLPGEKKNGLFGNLIALSLGLTPNFKSNEDLAE | |
| | DAKLQLSKDTYDEDLENLLAQIGDEYADLFLAAKNLSDAILLSGILTVKDEI | |
| | TKAPLSASMIKRYDEHHQDLTLLKQFVRQQLPEKYKEIFFDQSKNGYAGYID | |
| | GGASQEEFYKYLKKILEKLDGTEEFLDKIEREDFLRKQRTFDNGSIPHQIHL | |
| | QELHAILRRQEDYYPFLKENREKIEKILTFRIPYYVGPLARGNSRFAWMSRK | |
| | SDETITPWNFEEVVDKGASAQKFIERMTNFDKNLPNEKVLPKHSLLYEYFTV | |
| | YNELTKVKYVTEGMRKPIFLSSEQKQEIVDLLFKKNRKVTVKQLKEDYFKKI | |
| | ECFDSVEISGVEDRFNASLGTYHDLLKIIKDKDFLDNEENEDILEDIVLTLT | |
| | LFEDREMIEERLKKYADLFDDKVMKQLKRRRYTGWGRLSKKLINGIRDKQSG | |
| | KTILDYLIDDGFANRNFMQLIHDDSLTFKEEIEKAQVSGQGDSLHEVIANLA | |
| | GSPAIKKGILQTIKIVDELVKVMGRHAPENIVIEMARENQTTQKGQKNSRER | |
| | MKRLEEGIKELGSNILKEHPVENTQLQNDKLYLYYLQNGKDMYTGDELDIDR | |
| | LSDYDVDHIVPQSFLKDDSIDNKVLTSSAKARGKSDNVPSEEVVKKMKNYWK | |
| | QLLDAKLITQRKFDNLTKAERGGLTELDKAGFIKRQLVETRQITKHVAQILD | |
| | SRFNTKYDENDKLIRDVKIITLKSKLVSDFRKDFQLYKVREINNYHHAHDAY | |
| | LNAVVGTALIKKYPKLESEFVYGDYKVYDVRKMIAKSEQEIGKATAKMFFYS | |
| | NIMNFFKTEVTLANGEIRKRPLIETNEETGEIVWDKEKDFATVRKVLSMPQV | |
| | NIVKKTEVQTGGFSKESILPKRNSDKLIARKKDWDTKKYGGFDSPTVAYSVL | |
| | VIAKVEKGKAKKLKTVKELVGITIMERSSFEKNPIDFLEAKGYKEVKKDLII | |
| | KLPKYSLFELENGRKRLLASAGELQKGNELALPNKYVELLYLAKHYEKLKGS | |
| | PEDNEQKQLFVEQHKEYFDEILEQISEFSKRVILADANLEKIKKLYEKNEDK | |
| | SIEEQAENFINLLTFTALGAPAAFKFFDTTIDRKRYTSTKEILNATLIHQSI | |
| | TGLYETRIDLSQLGGD | |
| CasEnd-158 | MDKKYSIGLDIGTNSVGWAVITDEYKVPSKKFKVLGNTDRKSIKKNLIGALL | 118 |
| | FDSGETAEATRLKRTARRRYTRRKNRIRYLQEIFAEEMSKVDDGFFQRLEES | |
| | FLVEEDKKNERHPIFGNIVDEVAYHEKYPTIYHLRKYLADSTEKADLRLIYL | |
| | ALAHIIKFRGHFLIEGDLNSENTDVQKLFIQLVQTYNQLFEENPLNESGVDA | |
| | KAILSAKLSKSRRLENLIAQLPGEKKNGLFGNLIALSLGLTPNFKSNFDLSE | |
| | DAKLQLSKDTYDEDLDNLLAQIGDQYADLFLAAKNLSDAILLSDILTVNDES | |
| | TKAPLSASMVKRYDEHHQDLTLLKALVREQLPEKYKEIFFDESKNGYAGYID | |
| | GGASQEEFYKYIKPILEKMDGTEYLLAKINREDFLRKQRTFDNGSIPHQIHL | |
| | GELHAILRRQEDFYPFLKENQEKIEKILTFRIPYYVGPLARGNSRFAWMTRK | |
| | SDETITPWNFEEVVDKEASAQSFIERMTNFDKNLPEEKVLPKHSLLYEYFTV | |
| | YNELTKVKYVTEGMGKPEFLSGDQKEAIVDLLFKKNRKVTVKQLKEDYFKKI | |
| | ECFDSVEISGVEDRFNASLGTYHDLLKIIKDKDFLDNEENEDILEDIVLTLT | |
| | LFEDREMIEQRLKKYAHLFDKKVLKKLKRRRYTGWGRLSRKLINGIRDKQSG | |
| | KTILDFLKSDGFANRNFMQLIHDDSLTFKEIIAKAQVIGDGDSLHEVIANLA | |
| | GSPAIKKGILQSVKIVDELVKVMGRHAPENIVIEMARENQTTQKGQKNSRER | |
| | MKRIEEGIKELGSQILKEHPVENTQLQNEKLYLYYLQNGRDMYVDQELDINR | |
| | LSDYDVDHIVPQSFLKDDSIDNKVLTRSDKARGKSDNVPSEEVVKKMKNYWR | |
| | QLLNAKLITQRKFDNLTKAERGGLSELDKAGFIKRQLVETRQITKHVAQILD | |
| | SRFNTEVDENDKLIREVKIITLKSKLVSDFRKDFQFYKVREINDYHHAHDAY | |
| | LNAVVGTALIKKYPKLESEFVYGDYKVYDVRKMIAKSEQEIGKATAKYFFYS | |
| | NIMNFFKSEVTLANGTIRKRPLIETNEETGEIVWDKGKDFATVRKVLSMPQV | |
| | NIVKKTEVQTGGFSKESILPKRNSDKLIARKKDWDPKKYGGFDSPTVAYSVL | |
| | VVAKIEKGKTKKLKTVKELVGITIMERSSFEKDPVAFLETKGYKDIRIDLII | |
| | KLPKYSLFELENGRKRMLASAGELQKGNELALPSKYVTFLYLASHYEKLKGK | |
| | PEDREDKLEYVEQHRHYFDEILEQIIEFSERYILADANLEKIKELYNENNDY | |
| | PIEELAENFIHLFTFTSLGAPAAFKFFDKTIDRKRYTSTTEVLNATLIHQSI | |
| | TGLYETRIDLSQLGGD | |
| CasEnd-159 | MDKKYSIGLDIGTNSVGWAVITDEYKVPSKKFKVLGNTDRHSIKKNLIGALL | 119 |
| | FDSGETAEATRLKRTARRRYTRRKNRICYLQEIFSNEMAKVDDSFFQRLEES | |
| | FLVEEDKSNDRHPIFGNIVEEVAYHEKYPTIYHLRKHLADSPEKADLRLVYL | |
| | ALAHIIKFRGHFLIEGDLDAENTDVQKLFKELVEVYDRTFEESELEEETIDA | |
| | ESILTEKLSKSRRLENLIAKFPGEKKNSFFGNLIALALGLTPNFKSNFELSE | |
| | DAKLQFSKDTYEEDLEELLGQIGDDYADLFTAAKNLYDAILLSGILTVDDNS | |
| | TKAPLSASMVKRYDEHHQDLTLLKKFVRENLPEKYKEIFFDQSKNGYAGYID | |
| | GGASQEEFYKYLKKLLEKIDGSEYFLDKIEREDFLRKQRTFDNGSIPHQIHL | |
| | QELHAIIRRQGEYYPFLKENQEKIEKILTFRIPYYVGPLARGNSRFAWLSRK | |
| | SDETITPWNFDEVVDKEKSAEKFITRMTNFDKNLPEEKVLPKHSLLYEKFTV | |
| | YNELTKVKYVTEGGKKEEFFDANMKQEIFDNVFKKYRKVTKKQLLDYLAKEF | |
| | DEFDIVDISGVEDRFNASLGTYHDLKKILGDKSFLDNPANEKILEDIIKTLT | |
| | LFEDREMIKKRLEKYSDLFDKKQLKKLERRRYTGWGRLSAKLINGIRDKETG | |
| | KTILDYLIEDGPTNRNFMQLIHDDGLSFKEEISKAQVIDDTDSLHEHIANLA | |
| | GSPAIKKGILQTVKVVDELVKVMGRHKPENIVIEMARENQTTQKGQKNSRER | |
| | MKRIEEGIKELGSQILKEHPVENTQLQNEKLYLYYLQNGRDMYVDQELDINR | |
| | LSDYDVDHIVPQSFLKDDSIDNKVLTRSDKARGKSDNVPSEEVVKKMKNYWR | |
| | QLLNAKLITQRKFDNLTKAERGGLSELDKAGFIKRQLVETRQITKHVAQILD | |
| | SRMNTKYDENDKLIREVKVITLKSKLVSDFRKDFQFYKVREINNYHHAHDAY | |
| | LNAVVGTALIKKYPKLESEFVYGDYKVYDVRKMIAKSEQEIGKATAKYFFYS | |
| | NIMNFFKTEITLANGEIRKRPLIETNGETGEIVWDKGRDFATVRKVLSMPQV | |
| | NIVKKTEVQTGGFSKESILPKRNSDKLIARKKDWDPKKYGGFDSPTVAYSVL | |
| | VVAKVEKGKSKKLKSVKELLGITIMERSSFEKNPIDFLEAKGYKEVKKDLII | |
| | KLPKYSLFELENGRKRMLASAGELQKGNELALPSKYVNFLYLASHYEKLKGS | |
| | PEDNEQKQLFVEQHKHYLDEIIEQISEFSKRVILADANLDKVLSAYNKHRDK | |
| | PIREQAENIIHLFTLTNLGAPAAFKYFDTTIDRKRYTSTKEVLDATLIHQSI | |
| | TGLYETRIDLSQLGGD | |
| CasEnd-160 | MDKKYSIGLDIGTNSVGWAVITDEYKVPSKKFKVLGNTDRHSIKKNLIGALL | 120 |
| | FDSGETAEATRLKRTARRRYTRRKNRICYLQEIFSNEMAKVDDSFFQRLEES | |
| | FLVEEDKRGERHPIFGNIVDEVAYHEKYPTIYHLRKELADSTEKADLRLVYL | |
| | ALAHIIKFRGHFLIEGDLNSENTDVQKLFKQFVQVYNQTFEESHLSEETVDA | |
| | ESILTEKVSKSRRLENLIKQFPNEKKNGLFGNLIALSLGLQPNFKSNENLSE | |
| | DAKLQFSKDTYDEDLENLLGQIGDEYADLFVAAKNLYDAILLSGILTVNDES | |
| | TKAPLSASMIKRYDEHHQDLTLLKAFVRQQLPEKYKEIFFDETKNGYAGYID | |
| | GGASQEEFYKYIKPILEKVDGSEYFLDKIDREDFLRKQRTFDNGSIPHQIHL | |
| | QELHAILRRQEEFYPFLKENQEKIEKILTFRIPYYVGPLARGNSRFAWASRK | |
| | SDETITPWNFEEVVDKEASAEAFIERMTNNDKNLPEEKVLPKHSLLYEKFTV | |
| | YNELTKVKYVTEQMGKPKFFDANMKQEIFDGLFKKERKVTKKKLLDFLFKEF | |
| | DEFRIVDISGVEDAFNASLGTYHDLLKIIKDKDFLDNEENEDILEDIILTLT | |
| | LFEDREMIEERLKKYADLFDKKVLKKLKRRRYTGWGRLSKKLINGIRDKQSG | |
| | KTILDYLIDDGFANRNFMQLIHDDSLSFKEEIAKAQVIGQGDSLHEHIANLA | |
| | GSPAIKKGILQTVKVVDELVKVMGRHKPENIVIEMARENQTTQKGQKNSRER | |
| | MKRIEEGIKELGSQILKEHPVENTQLQNEKLYLYYLQNGRDMYVDQELDINR | |
| | LSDYDVDHIVPQSFLKDDSIDNKVLTRSDKARGKSDNVPSEEVVKKMKNYWR | |
| | QLLNAKLITQRKFDNLTKAERGGLSELDKAGFIKRQLVETRQITKHVAQILD | |
| | SRMNTKYDENDKLIREVKVITLKSKLVSDFRKDFQFYKVREINNYHHAHDAY | |
| | LNAVVGTALIKKYPKLESEFVYGDYKVYDVRKMIAKSEQEIGKATAKYFFYS | |
| | NIMNFFKTEITLANGEIRKRPLIETNGETGEIVWDKGRDFATVRKVLSMPQV | |
| | NIVKKTEVQTGGFSKESILPKRNSDKLIARKKDWDTKKYGGFDSPTVAYSVL | |
| | VVADIEKGKAKKLKTVKELVGITIMERSSFEKNPVAFLESKGYQNIQEDKII | |
| | KLPKYSLFELENGRKRLLASAGELQKGNELALPQKYVTLLYHAKHYEKLKGK | |
| | DEDNEKHLEYVEQHRDEFDEILDQISEFSERYILADKNLEKIKELYEKNEDA | |
| | SIEELASSFINLLTLTALGAPAAFKFFGTTIDRKRYTSTKEILNATLIHQSI | |
| | TGLYETRIDLSKLGGD | |
| CasEnd-161 | MDKKYSIGLDIGTNSVGWAVITDEYKVPSKKFKVLGNTDRHSIKKNLIGALL | 121 |
| | FDSGETAEATRLKRTARRRYTRRKNRICYLQEIFSNEMAKVDDSFFHRLEES | |
| | FLVEEDKKHERHPIFGNIVDEVAYHEKYPTIYHLRKKLADSTEKADLRLIYL | |
| | ALAHIIKFRGHFLIEGDLNSENSDVDKLFIQLVQTYNQLFEENPINEEGVDA | |
| | KAILSAKLSKSRRLENLIAQFPGEKRNGLFGNLIALSLGLTPNFKSNEDLAE | |
| | DAKLQLSKDTYDEDLDNLLAQIGDQYADLFLAAKNLSDAILLSDILTVNSEI | |
| | TKAPLSASMIKRYDEHHQDLTLLKALVRQQLPEKYKEIFFDESKNGYAGYID | |
| | GGASQEEFYKYIKPILEKMDGTEELLAKINREDFLRKQRTFDNGSIPHQIHL | |
| | GELHAILRRQEDFYPFLKENREKIEKILTFRIPYYVGPLARGNSRFAWMTRK | |
| | SEETITPWNFEEVVDKEASAQSFIERMTNFDKNLPNEKVLPKHSLLYEYFTV | |
| | YNELTKVKYVTEGMGKPEFLSGEQKQEIVDLLFKKNRKVTVKQLKEFLFKKI | |
| | ECFDSVEISGVEDRFNASLGTYHDLLKIIKDKDFLDNEENEDILEDIVLTLT | |
| | LFEDKEMIEERLKKYANLFDKKVLKQLKRRRYTGWGRLSKKLINGIRDKQSG | |
| | KTILDFLKSDGFANRNFMQLIHDDSLTFKEEIAKAQVSGQGDSLHEHIANLA | |
| | GSPAIKKGILQTVKVVDELVKVMGRHKPENIVIEMARENQTTQKGQKNSRER | |
| | MKRIEEGIKELGSQILKEHPVENTQLQNEKLYLYYLQNGRDMYVDQELDINR | |
| | LSDYDVDHIVPQSFLKDDSIDNKVLTRSDKARGKSDNVPSEEVVKKMKNYWR | |
| | QLLNAKLITQRKFDNLTKAERGGLSELDKAGFIKRQLVETRQITKHVAQILD | |
| | SRMNTKYDENDKLIREVKVITLKSKLVSDFRKDFQFYKVREINNYHHAHDAY | |
| | LNAVVGTALIKKYPKLESEFVYGDYKVYDVRKMIAKSEQEIGKATAKYFFYS | |
| | NIMNFFKTEITLANGEIRKRPLIETNGETGEIVWDKGRDFATVRKVLSMPQV | |
| | NIVKKTEVQTGGFSKESILPKRKSDKLIARKKDWDPKKYGGFDSPTVAYSVL | |
| | VVAKVEKGKSKKLKTVKELVGITIMERSSFEKDPVDFLEAKGYKEVQKDLII | |
| | KLPKYSLFELENGRKRMLASAGELQKGNELALPSKYVILLYLASHYEKLKGS | |
| | PEDNEQHREYVEQHRHYFDEILDQISEFSERYILADKNLEKILELYSEFEDY | |
| | SIEEQAESFINLFTLTALGAPAAFKFFDTTIDRKRYTSTKEILNATLIHQSI | |
| | TGLYETRIDLSQLGGD | |
| CasEnd-162 | MDKKYSIGLDIGTNSVGWAVITDEYKVPSKKFKVLGNTDRQSIKKNLIGALL | 122 |
| | FDSGETAEATRLKRTARRRYTRRKNRIRYLQEIFAEEMSKVDDSFFHRLEES | |
| | FLVEEDKKHERHPIFGNIVDEVAYHEKYPTIYHLRKKLVDSTEKADLRLIYL | |
| | ALAHMIKFRGHFLIEGDLNSENSDVDKLFIQLVQTYNQLFEENPINESGVDA | |
| | KAILSAKLSKSRRLENLIAQLPGEKKNGLFGNLIALSLGLTPNFKSNEDLAE | |
| | DAKLQLSKDTYDDDLDNLLAQIGDQYADLFLAAKNLSDAILLSDILRVNTEI | |
| | TKAPLSASMIKRYDEHHQDLTLLKALVRQQLPEKYKEIFFDKSKNGYAGYID | |
| | GGASQEEFYKFIKPILEKMDGTEELLAKLNREDLLRKQRTFDNGSIPHQIHL | |
| | GELHAILRRQEDFYPFLKENREKIEKILTFRIPYYVGPLARGNSRFAWMTRK | |
| | SDETITPWNFEEVVDKGASAQSFIERMTNFDKNLPEEKVLPKHSLLYEYFTV | |
| | YNELTKVKYVTEGMGKPEFLSGEQKKEIVDLLFKKNRKVTVKQLKEFYFKEI | |
| | ECFDSVEISGVEDRFNASLGTYHDLLKIIKDKDFLDNEENEDILEDIVLTLT | |
| | LFEDREMIEERLKKYANLFDKKVMKQLKRRRYTGWGRLSRKLINGIRDKQSG | |
| | KTILDFLKSDGFANRNFMQLIHDDSLTFKEEIEKAQVKGQGDSLHEQIANLA | |
| | GSPAIKKGILQTVKVVDELVKVMGRHKPENIVIEMARENQTTQKGQKNSRER | |
| | MKRIEEGIKELGSQILKEHPVENTQLQNEKLYLYYLQNGRDMYTGQELDINR | |
| | LSDYDVDHIVPQSFLKDDSIDNKVLTRSKKARGKSDNVPSEEVVKKMKSYWR | |
| | QLLKAKLITQRKFDNLTKAERGGLSELDKAGFIKRQLVETRQITKHVAQILD | |
| | SRMNTKRDENDKLIRDVKVITLKSKLVSDFRKDFQFYKVREINNYHHAHDAY | |
| | LNAVVGTALIKKYPKLESEFVYGDYKVYDVRKMIAKSEQEIGKATAKYFFYS | |
| | NIMNFFKSEITLANGEIRKRPVIETNEETGEIVWDKERDFATVRKVLSMPQV | |
| | NIVKKTEVQTGGFSKESILPKRESDKLIARKKDWDPKKYGGFDSPTVAYSVL | |
| | VVAKIEKGKTKKLKTVKELLGITIMERSSFEKDPVAFLEAKGYKEVKKDLII | |
| | KLPKYSLFELENGRKRMLASAGELQKGNELALPSKYVNFLYLASHYEKLKGS | |
| | PEDNEQKQLFVEQHKDYLDEIIDQISEFSERVILADKNLEKVLSAYNENRDK | |
| | SIEEQAENIIHLFTLTNLGAPAAFKYFDTTIDRKRYTSTKEVLDATLIHQSI | |
| | TGLYETRIDLSQLGGD | |
| CasEnd-163 | MDKKYSIGLDIGTNSVGWAVITDEYKVPSKKFKVLGNTDRHSIKKNLIGALL | 123 |
| | FDSGETAEATRLKRTARRRYTRRKNRILYLQEIFSNEMAKVDDSFFHRLEES | |
| | FLVEEDKRHERHPIFGNIVDEVAYHEKYPTIYHLRKKLADSTEKADLRLIYL | |
| | ALAHMIKFRGHFLIEGDLNSDNSDVQKLFIQLVQTYNQLFEENPINEEGVDA | |
| | KAILTARLSKSRRLENLIAQLPGEKKNGLFGNLIALSLGLTPNFKSNEDLAE | |
| | DAKLQLSKDTYDEDLENLLAQIGDQYADLFLAAKNLSDAILLSGILTVNTEI | |
| | TKAPLSASMVKRYDEHHQDLTLLKQLVRKQLPEKYKEIFFDQSKNGYAGYID | |
| | GGASQEEFYKYLKPILEKMDGTEEFLAKINREDFLRKQRTFDNGSIPHQIHL | |
| | GELHAILRRQEEYYPFLKENREKIEKILTFRIPYYVGPLARGNSRFAWMTRK | |
| | SDETITPWNFEEVVDKEASAQAFIERMTNFDKNLPNEKVLPKHSLLYEYFTV | |
| | YNELTKVKYVTEGMRKPEFLSAEQKQEIVDLLFKKNRKVTVKQLKEDYFKKF | |
| | ECFDSVEISGVEDRFNASLGTYHDLLKIIKDKDFLDNEENEKILEDIVLTLT | |
| | LFEDREMIEERLKKYADLFDDKQLKQLKRRRYTGWGRLSRKLINGIRDKQSG | |
| | KTILDFLKADGFANRNFMQLIHDDSLTFKEEIQKAQVSGQGDSLHETIANLA | |
| | GSPAIKKGILQTLKIVDELVKVMGRHEPENIVIEMARENQTTQKGQKNSRER | |
| | MKRIEEGIKELGSQILKEHPVENTQLQNEKLYLYYLQNGRDMYVDQELDINR | |
| | LSDYDVDHIVPQSFLKDDSIDNKVLTRSDKARGKSDNVPSEEVVKKMKNYWR | |
| | QLLNAKLITQRKFDNLTKAERGGLSELDKAGFIKRQLVETRQITKHVAQILD | |
| | SRFNTKYDENDKLIRDVKIITLKSKLVSDFRKDFQFYKVREINNYHHAHDAY | |
| | LNAVVGTALIKKYPKLESEFVYGDYKVYDVRKMIAKSEQEIGKATAKYFFYS | |
| | NIMNFFKTEITLANGEIRKRPLIETNGETGEIVWDKGKDFATVRKVLSMPQV | |
| | NIVKKTEVQTGGFSKESILPKRNSDKLIARKKDWDPKKYGGFDSPTVAYSVL | |
| | VVAKVEKGKAKKLKTVKELVGITIMERSSFEKNPIAFLEAKGYKEVKKDLII | |
| | KLPKYSLFELENGRKRMLASAGELQKGNELALPNKYVNLLYLASHYEKLKGS | |
| | PEDNEQKQLFVEQHKHYFDEIIEQISEFSKRVILADANLEKIKSLYEKNRDK | |
| | SIEELAENFIHLFTFTALGAPAAFKFFDTTIDRKRYTSTKEILNATLIHQSI | |
| | TGLYETRIDLSQLGGD | |
| CasEnd-164 | MDKKYSIGLDIGTNSVGWAVITDDYKVPSKKFKVLGNTDRQSIKKNLIGALL | 124 |
| | FDSGETAEATRLKRTARRRYTRRKNRIRYLQEIFAEEMAKVDDSFFHRLEES | |
| | FLVEEDKKHERHPIFGNIVDEVAYHEKYPTIYHLRKKLVDSTEKADLRLIYL | |
| | ALAHMIKFRGHFLIEGDLNSENSDVDKLFIQLVQTYNQLFEENPINEEGVDA | |
| | KAILSAKLSKSRRLENLIAQFPGEKKNGLFGNLIALSLGLTPNFKSNEDLSE | |
| | DAKLQLSKDTYDDDLDNLLAQIGDQYADLFLAAKNLSDAILLSDILRVNTEI | |
| | TKAPLSASMIKRYDEHHQDLTLLKALVRQQLPEKYKEIFFDESKNGYAGYID | |
| | GGASQEEFYKFIKPILEKMDGTEELLAKLNREDLLRKQRTFDNGSIPHQIHL | |
| | GELHAILRRQEEFYPFLKENREKIEKILTFRIPYYVGPLARGNSRFAWMTRK | |
| | SDETITPWNFEEVVDKGASAQSFIERMTNFDENLPEEKVLPKHSLLYEYFTV | |
| | YNELTKVKYVTEGMRKPEFLSGEQKKEIVDLLFKKNRKVTVKQLKEDYFKKI | |
| | ECFDSVEISGVEDRFNASLGTYHDLLKIIKDKDFLDNEENEDILEDIVLTLT | |
| | LFEDREMIEERLKKYANLFDDKVMKQLKRRRYTGWGRLSRKLINGIRDKQSG | |
| | KTILDFLKSDGFANRNFMQLIHDDSLTFKEEIEKAQVKGQGDSLHEQIANLA | |
| | GSPAIKKGILQTVKVVDELVKVMGRHKPENIVIEMARENQTTQKGQKNSRER | |
| | MKRIEEGIKELGSQILKEHPVENTQLQNDKLYLYYLQNGRDMYTGQELDINR | |
| | LSQYDVDHIVPQSFLKDDSIDNKVLTRSAKARGKSDNVPSEEVVKKMKNYWR | |
| | QLLKAKLITQRKFDNLTKAERGGLSELDKAGFIKRQLVETRQITKHVAQILD | |
| | SRMNTKRDENDKLIRDVKVITLKSKLVSDFRKDFQFYKVREINNYHHAHDAY | |
| | LNAVVGTALIKKYPKLESEFVYGDYKKYDVRKMIAKSEQEIGKATAKYFFYS | |
| | NIMNFFKTEIKLANGEIRKRPLIETNEETGEIVWDKERDFATVRKVLSMPQV | |
| | NIVKKTEVQTGGFSKESILPKRESDKLIARKKGWDPKKYGGFDSPTVAYSVL | |
| | VVAKVEKGKTKKLKTVKELLGITIMERSSFEKDPVAFLEAKGYKDVKKDLII | |
| | KLPKYSLFELENGRKRMLASAGELQKGNELALPSKYVNFLYLASHYESLKGS | |
| | PEDNEKKQEYVEQHKHYLDEIIDQISEFSERVILADANLEKVLSAYNNERDK | |
| | SIEEQAENIIHLFTLTNLGAPAAFKYFDTTIDRKRYTSTKEVLDATLIHQSI | |
| | TGLYETRIDLSQLGGD | |
| CasEnd-165 | MDKKYSIGLDIGTNSVGWAVITDEYKVPSKKFKVLGNTDRHSIKKNLIGALL | 125 |
| | FDSGETAEATRLKRTARRRYTRRKNRICYLQEIFSNEMAKVDESFFHRLEES | |
| | FLVEEDKSFERHPIFGNIVEEVAYHEKYPTIYHLRKKLVDSPEKADLRLIYL | |
| | ALAHMIKFRGHFLIEGDLNSDNSDVQKLFKQLVQTYNQLFEESPIEAEGVDA | |
| | KSILSEKLSKSRRLENLIAQLPGEKKNGLFGNLIALSLGLTPNFKSNEDLSE | |
| | DAKLQLSKDTYDDDLEELLGQIGDEYADLFLAAKNLSDAILLSGILRVDTES | |
| | TKAPLSASMIKRYDEHHQDLTLLKQLVREQLPEKYKEIFFDQSKNGYAGYID | |
| | GGASQEEFYKYIKKILEKMDGTEELLDKLEREDLLRKQRTFDNGSIPHQIHL | |
| | GELHAILRRQEEYYPFLKENREKIEKILTFRIPYYVGPLARGNSRFAWMSRK | |
| | SDETITPWNFDEVVDKGASAEKFIERMTNFDKNLPEEKVLPKHSLLYEYFTV | |
| | YNELTKVKYVTEGMRKPEFLDGNQKKEIVDDLFKKNRKVTVKQLKEYYFKKE | |
| | ECFDSVEISGVEDRFNASLGTYHDLLKIIKDKSFLDNDENEKILEDIVLTLT | |
| | LFEDREMIKKRLEKYADLFDKKVMKQLKRRRYTGWGRLSKKLINGIRDKQSG | |
| | KTILDFLIDDGFANRNFMQLIHDDSLTFKDEIAKAQVIGKGDSLHEHIANLA | |
| | GSPAIKKGILQTVKVVDELVKVMGRHKPENIVIEMARENQTTQKGQKNSRER | |
| | MKRIEEGIKELGSQILKEHPVENTQLQNEKLYLYYLQNGRDMYVDQELDINR | |
| | LSDYDVDHIVPQSFLKDDSIDNKVLTRSDKARGKSDNVPSEEVVKKMKNYWR | |
| | QLLNAKLITQRKFDNLTKAERGGLSELDKAGFIKRQLVETRQITKHVAQILD | |
| | SRMNTKYDENDKLIREVKVITLKSKLVSDFRKDFQFYKVREINNYHHAHDAY | |
| | LNAVVGTALIKKYPKLESEFVYGDYKVYDVRKMIAKSEQEIGKATAKYFFYS | |
| | NIMNFFKTEITLANGEIRKRPLIETNGETGEIVWDKGRDFATVRKVLSMPQV | |
| | NIVKKTEVQTGGFSKESILPKRNSDKLIARKKDWDPKKYGGFDSPTVAYSVL | |
| | VVAKVEKGKSKKLKSVKELLGITIMERSSFEKNPIDFLEAKGYKEVKKDLII | |
| | KLPKYSLFELENGRKRMLASAGELQKGNELALPSKYVNFLYLASHYEKLKGS | |
| | PEDNEQKQLFVEQHKHYLDEIIEQISEFSKRVILADANLDKVLSAYNKHRDK | |
| | PIREQAENIIHLFTLTNLGAPAAFKYFDTTIDRKRYTSTKEVLDATLIHQSI | |
| | TGLYETRIDLSQLGGD | |
| CasEnd-166 | MDKKYSIGLDIGTNSVGWAVITDEYKVPSKKFKVLGNTDRHSIKKNLIGALL | 126 |
| | FDSGETAEATRLKRTARRRYTRRKNRICYLQEIFSNEMAKVDDSFFHRLEES | |
| | FLVEEDKRNERHPIFGNIVEEVAYHEKYPTIYHLRKKLADSDEKADLRLVYL | |
| | ALAHIIKFRGHFLIEGDLDAENTDVQKLFRELVEVYNQTFEESPLEEITVDA | |
| | EAILTEKLSKSRRLENLIAQFPGEKKNGLFGNLLALALGLTPNFKSNEDLEE | |
| | DAKLQFSKDTYDEDLEELLGQIGDEYADLFLAAKKLYDAILLSGILTVDDES | |
| | TKAPLSASMVKRYDEHHQDLTLLKQFIRKKLPEKYKEIFFDQSKNGYAGYID | |
| | GGASQEEFYKYLKKILEKIDGSEEFLDKIEREDFLRKQRTFDNGSIPHQIHL | |
| | QELHAIIRRQEEYYPFLKENREKIEKILTFRIPYYVGPLARGNSRFAWLSRK | |
| | SDETITPWNFDEVVDKEKSAEAFIERMTNFDKNLPEEKVLPKHSLLYEKFTV | |
| | YNELTKVKYVTEGGKKPEFFDAEQKQEIFDNLFKKERKVTKKQLKDYLFKEF | |
| | DEFRIVEISGVEDRFNASLGTYHDLLKIIKDKDFLDNPENEEILEDIILTLT | |
| | LFEDREMIKKRLEKYADLFDKKQLKKLSRRRYTGWGRLSAKLINGIRDKQTG | |
| | KTILDYLIDDGFANRNFMQLIHDDSLTFKEEIEKAQVIGDGDSLHEHIANLA | |
| | GSPAIKKGILQTVKVVDELVKVMGRHKPENIVIEMARENQTTQKGQKNSRER | |
| | MKRIEEGIKELGSQILKEHPVENTQLQNEKLYLYYLQNGRDMYVDQELDINR | |
| | LSDYDVDHIVPQSFLKDDSIDNKVLTRSDKARGKSDNVPSEEVVKKMKNYWR | |
| | QLLNAKLITQRKFDNLTKAERGGLSELDKAGFIKRQLVETRQITKHVAQILD | |
| | SRMNTKYDENDKLIREVKVITLKSKLVSDFRKDFQFYKVREINNYHHAHDAY | |
| | LNAVVGTALIKKYPKLESEFVYGDYKVYDVRKMIAKSEQEIGKATAKYFFYS | |
| | NIMNFFKTEITLANGEIRKRPLIETNGETGEIVWDKGRDFATVRKVLSMPQV | |
| | NIVKKTEVQTGGFSKESILPKRDSDKLIARKKDWDTKKYGGFDSPTVAYSVL | |
| | VVADVEKGKAKKLKTVKELVGITIMERSAFEKNPVAFLEDKGYQNIKKELII | |
| | KLPKYSLFELENGRKRLLASAGELQKGNELALPQHYVILLYHAKHYEKLKGS | |
| | PEDNEYKQLYVEEHKDEFDEILDQIIEFSKRYILADANLEKIKSLYEKNKDA | |
| | SIEELAENFIHLLTFTALGAPAAFKFFGKTIDRKRYTSTKEILNATLIHQSI | |
| | TGLYETRIDLSKLGGD | |
| CasEnd-167 | MDKKYSIGLDIGTNSVGWAVITDEYKVPSKKFKVLGNTDRHSIKKNLIGALL | 127 |
| | FDSGETAEATRLKRTARRRYTRRKNRICYLQEIFSNEMAKVDDSFFHRLEES | |
| | FLVEEDKRGERHPIFGNIVEEVAYHEKYPTIYHLRKHLADSTEKADLRLVYL | |
| | ALAHIIKFRGHFLIEGDLNAENSDVQKLFKQLVEVYDQTFEESPLSEITVDA | |
| | KAILTEKLSKSRRLENLIKQFPNEKKNGLFGNLIALSLGLQPNFKTNENLSE | |
| | DAKLQFSKDTYDEDLENLLGQIGDEYADLFLAAKNLYDAILLSGILTVNDES | |
| | TKAPLSASMIKRYDEHHQDLTLLKQFIRKQLPEKYKEIFFDESKNGYAGYID | |
| | GGASQEEFYKYIKKLLEKMDGSEYFLDKIEREDFLRKQRTFDNGSIPHQIHL | |
| | QELHAILRRQEEYYPFLKENQEKIEKILTFRIPYYVGPLARGNSRFAWMTRK | |
| | SDETITPWNFDEVVDKEKSAEAFIERMTNNDKNLPEEKVLPKHSLLYEKFTV | |
| | YNELTKVKYVTEGMGKAQFFDANQKQEIFDGLFKKYRKVTKKKLLDFLDKEF | |
| | DEFRIVDISGVEDAFNASLGTYHDLLKIIKDKDELDNPENEDILEDIILTLT | |
| | LFEDREMIEKRLSKYADLFDKKVLKKLKRRRYTGWGRLSKKLINGIRDKQSG | |
| | KTILDYLIDDGFANRNFMQLIHDDSLSFKEEIKKAQVIGQGDSLHEHIANLA | |
| | GSPAIKKGILQTVKVVDELVKVMGRHKPENIVIEMARENQTTQKGQKNSRER | |
| | MKRIEEGIKELGSQILKEHPVENTQLQNEKLYLYYLQNGRDMYVDQELDINR | |
| | LSDYDVDHIVPQSFLKDDSIDNKVLTRSDKARGKSDNVPSEEVVKKMKNYWR | |
| | QLLNAKLITQRKFDNLTKAERGGLSELDKAGFIKRQLVETRQITKHVAQILD | |
| | SRMNTKYDENDKLIREVKVITLKSKLVSDFRKDFQFYKVREINNYHHAHDAY | |
| | LNAVVGTALIKKYPKLESEFVYGDYKVYDVRKMIAKSEQEIGKATAKYFFYS | |
| | NIMNFFKTEITLANGEIRKRPLIETNGETGEIVWDKGRDFATVRKVLSMPQV | |
| | NIVKKTEVQTGGFSKESILPKRDSDKLIARKKDWDTKKYGGFDSPTVAYSVL | |
| | VVADIEKGKAKKLKTVKELIGITIMERSSFEKNPVAFLEDKGYKNIQEETII | |
| | KLPKYSLFELENGRKRLLASAGELQKGNELALPNKYVTLLYHAKHYEKLKGK | |
| | PEDEEKHLEYVEKHRDEFNEILDQISEFSERYILADKNLSKINELYKKNNDK | |
| | SIEELASSFINLLTFTALGAPAAFKFLGTTIDRKRYTSTKEILNATLIHQSI | |
| | TGLYETRIDLSKLGGD | |
| CasEnd-168 | MDKPYSIGLDIGTNSVGWAVVTDEYKVPSKKFKVLGNTDRHSIKKNLLGALL | 128 |
| | FDSGETAEATRLKRTARRRYTRRKNRILYLQEIFAEEMAKVDDSFFHRLEES | |
| | FLVEEDKRGERHPIFGNIVEEVAYHEKYPTIYHLRKKLADSDEKADLRLVYL | |
| | ALAHIIKFRGHFLIEGDLNAENSDVQKLFDQLVQTYNRLFEESPLEEEEVDA | |
| | EAILTEKLSKSRRLENLIAQFPGEKKNGLFGNLIALSLGLTPNFKSNFDLAE | |
| | DAKLQFSKDTYDEDLEELLAQIGDEYADLFLAAKNLYDAILLSGILTVSDES | |
| | TKAPLSASMVKRYDEHHQDLTLLKKFIRKQLPEKYKEIFFDQSKNGYAGYID | |
| | GGASQEEFYKYLKKILEKIDGSEEFLDKIEREDFLRKQRTFDNGSIPHQIHL | |
| | QELHAILRRQEKYYPFLKENQEKIEKILTFRIPYYVGPLARGNSRFAWMSRK | |
| | SDETITPWNFEEVVDKEASAEKFIERMTNFDKNLPNEKVLPKHSLLYEKFTV | |
| | YNELTKVKYVTEGMRKPKFFSAEQKQEIVDLLFKKNRKVTKKQLKEYLKKEF | |
| | ECFDIVEISGVEDRFNASLGTYHDLLKIIKDKDFLDNEENEEILEDIVLTLT | |
| | LFEDREMIKKRLEKYADLFDKKQLKKLKRRRYTGWGRLSAKLINGIRDKQSG | |
| | KTILDYLIDDGFANRNFMQLIHDDSLTFKEEIAKAQVIGQGDSLHEVIANLA | |
| | GSPAIKKGILQSLKIVDELVKVMGRHEPENIVIEMARENQTTQKGQKNSRER | |
| | MKRLEEAIKELGSKILKEHPVENTKLQNDKLYLYYLQNGKDMYTGEELDIDR | |
| | LSDYDVDHIVPQSFLKDDSIDNKVLVSSKKARGKSDDVPSEEVVKKMKGYWK | |
| | KLLDAKLITQRKFDNLTKAERGGLTELDKAGFIKRQLVETRQITKHVAQILD | |
| | SRFNTEYDENDKLIRDVKIITLKSKLVSQFRKDFELYKVREINNYHHAHDAY | |
| | LNAVVGTALIKKYPKLESEFVYGDYKVYDVRKMIAKSEQEIGKATAKYFFYS | |
| | NIMNFFKTEVKLANGEIRKRPLIEVNEETGEIVWDKEKDFATVRKVLSMPQV | |
| | NIVKKTEVQTGGFSKESILPKRDSDKLIARKKDWDTKKYGGFDSPTVAYSVL | |
| | VIAKVEKGKAKKLKTVKELVGITIMERSAFEKNPIAFLEDKGYQNIKKDLII | |
| | KLPKYSLFELENGRKRLLASAGELQKGNELALPNKYVELLYHAKHYEKLKGK | |
| | PEDNEEKQLYVEQHKSYFDEILEQISEFSKRYILADANLEKIKKLYEKNRDA | |
| | SIEELAESFINLLTFTALGAPAAFKFFDTTIDRKRYTSTKEILNATLIHQSI | |
| | TGLYETRIDLSKLGGD | |
| CasEnd-169 | MDKKYSIGLDIGTNSVGWAVVTDDYKVPSKKFKVLGNTDRKSIKKNLLGALL | 129 |
| | FDSGETAEATRLKRTARRRYTRRKNRICYLQEIFSNEMAKVDESFFHRLEES | |
| | FLVEEDKRGERHPIFGNIVEEVAYHEKFPTIYHLRKELADSPEKADLRLVYL | |
| | ALAHIIKFRGHFLIEGDLNSENTDVDKLFIQLVQTYNQLFEENPINASGVDA | |
| | KAILSARLSKSRRLENLIAQLPGEKKNGLFGNLIALSLGLTPNFKSNEDLAE | |
| | DAKLQLSKDTYDDDLDNLLAQIGDQYADLFLAAKNLSDAILLSDILRVNDES | |
| | TKAPLSASMVKRYEEHHKDLTLLKQFIRKQLPEKYKEIFFDKSKNGYAGYID | |
| | GGASQEEFYKYIKKILEKIDGSEEFLDKIEREDFLRKQRTFDNGSIPHQIHL | |
| | QELHAILRRQEKYYPFLKENQEKIEKILTFRIPYYVGPLARGNSRFAWLSRK | |
| | SEETITPWNFDEIVDKEASAEAFIERMTNFDKNLPNEKVLPKHSLLYEKFTV | |
| | YNELTKVKYVTEGGKKPKFFDANQKQEIVDLLFKKNRKVTKKQLKDFLNKEF | |
| | DEFRIVEISGVEDRFNASLGTYHDLLKIIGDKDFLDNSENEEILEDIILTLT | |
| | LFEDREMIKKRLEKYADLFDKEQLKKLERRRYTGWGRLSAKLINGIRDKQSG | |
| | KTILDYLIDDGFANRNFMQLIHDDSLSFKEEIAKAQVIGDTDSLHEIIANLA | |
| | GSPAIKKGILQSIKIVDELVKVMGRYAPENIVVEMARENQTTAKGQKNSRER | |
| | MKRIEEGIKELGSQILKEHPVENTQLQNEKLYLYYLQNGRDMYVDQELDINR | |
| | LSDYDVDHIVPQSFLKDDSIDNKVLTRSDKARGKSDNVPSEEVVKKMKNYWR | |
| | QLLNAKLITQRKFDNLTKAERGGLTDDDKAGFIKRQLVETRQITKHVAQILD | |
| | SRFNTEYDENGKLIRKVKIVTLKSKLVSDFRKDFELYKVREINDYHHAHDAY | |
| | LNAVVGKALIKKYPKLESEFVYGDYPKYNSRKMIAKSDRERGKATAKMFFYS | |
| | NIMNFFKSDVKLADGEIRERPLIEVNEETGEIVWDKVKHIATVKKVLSMPQV | |
| | NIVKKTEVQTGGFSKESILPKRDSDKLIARKKDWDTKKYGGFDSPTVAYSVL | |
| | VVADIEKGKAKKLKTVKELVGITIMERSAFEKDPVAFLEDKGYQNIQEDNII | |
| | KLPKYSLFELENGRKRLLASAGELQKGNELALPNHLVTLLYHAKHIEKLKGK | |
| | PEDEEEKLSYVEQHREEFDELLDQIIEFSKRYILADANLEKIKKLYEKNEEA | |
| | DIEELASSFINLLTFTALGAPAAFKFFDKTIDRKRYTSTKEILNATLIHQSI | |
| | TGLYETRIDLSKLGGD | |
| CasEnd-170 | MDKKYSIGLDIGTNSVGWAVITDEYKVPSKKFKVLGNTDRQSIKKNLIGALL | 130 |
| | FDSGETAEATRLKRTARRRYTRRKNRIRYLQEIFSEEMSKVDDSFFHRLEES | |
| | FLVEEDKKHERHPIFGNIVDEVAYHEKYPTIYHLRKKLADSTEKADLRLIYL | |
| | ALAHIIKFRGHFLIEGDLNPENSDVQKLFIQLVQTYNQLFEENPINESGVDA | |
| | KAILSAKLSKSRRLENLIAQLPGEKKNGLFGNLIALSLGLTPNFKSNEDLAE | |
| | DAKLQLSKDTYDEDLDNLLAQIGDQYADLFLAAKNLSDAILLSDILTVNSEI | |
| | TKAPLSASMIKRYDEHHQDLTLLKALVRQQLPEKYKEIFFDKSKNGYAGYID | |
| | GGASQEEFYKYIKPILEKMDGTEELLAKLNREDLLRKQRTFDNGSIPHQIHL | |
| | GELHAILRRQEEFYPFLKENREKIEKILTFRIPYYVGPLARGNSRFAWMTRK | |
| | SEETITPWNFEEVVDKGASAQAFIERMTNFDKNLPNEKVLPKHSLLYEYFTV | |
| | YNELTKVKYVTEGMRKPEFLSGEQKEEIVDLLFKTNRKVTVKQLKEDYFKKI | |
| | ECFDSVEISGVEDRFNASLGTYHDLLKIIKDKDFLDNEENEDILEDIVLTLT | |
| | LFEDREMIEERLEKYAHLFDKKVLKQLKRRRYTGWGRLSRKLINGIRDKQSG | |
| | KTILDFLKSDGFANRNFMQLIHDDSLTFKEEIQKAQVIGQGDSLHEQIANLA | |
| | GSPAIKKGILQTVKIVDELVKVMGRHKPENIVIEMARENQTTQKGQKNSRER | |
| | MKRIEEGIKELGSQILKEHPVENTQLQNEKLYLYYLQNGRDMYVDQELDINR | |
| | LSDYDVDHIVPQSFLKDDSIDNKVLTRSDKARGKSDNVPSEEVVKKMKNYWR | |
| | QLLNAKLITQRKFDNLTKAERGGLSELDKAGFIKRQLVETRQITKHVAQILD | |
| | SRFNTEYDENDKLIREVKIITLKSKLVSDFRKDFQFYKVREINNYHHAHDAY | |
| | LNAVVGTALIKKYPKLESEFVYGDYKVYDVRKMIAKSEQEIGKATAKYFFYS | |
| | NIMNFFKTEITLANGEIRKRPLIETNEETGEIVWDKGKDFATVRKVLSMPQV | |
| | NIVKKTEVQTGGFSKESILPKRNSDKLIARKKDWDTKKYGGFDSPTVAYSVL | |
| | VVAKVEKGKSKKLKTVKELVGITIMERSSFEKNPVDFLEAKGYKNVQKDLII | |
| | KLPKYSLFELENGRKRLLASAGELQKGNELALPQKYVTLLYLASHYEKLKGS | |
| | SEDNEKKLEFVEQHRHYFDEIIEQISEFSERYILADKNLEKILSLYDEFEDY | |
| | SIEELAENFIHLFTFTSLGAPAAFKFFDTTIDRKRYTSTTEILDATLIHQSI | |
| | TGLYETRIDLSQLGGD | |
| CasEnd-171 | MDKKYSIGLDIGTNSVGWAVVTDEYKVPSKKFKVLGNTDRHSIKKNLIGALL | 131 |
| | FDSGETAEATRLKRTARRRYTRRKNRIRYLQEIFAEEMAKVDDSFFHRLEES | |
| | FLVEEDKRNERHPIFGNIVDEVAYHEKYPTIYHLRKKLADSDEKADLRLVYL | |
| | ALAHIIKFRGHFLIEGDLNAENTDVQKLFEQLVETYNQLFEESPLDEEKVDA | |
| | KAILTEKLSKSRRLENLIAQFPGEKKNGLFGNLLALSLGLTPNFKSNEDLSE | |
| | DAKLQFSKDTYDEDLEELLGQIGDEYADLFLAAKNLYDAILLSGILTVNDES | |
| | TKAPLSASMVKRYDEHHQDLTLLKKFIRQQLPEKYKEIFFDQSKNGYAGYID | |
| | GGASQEEFYKYLKPILEKIDGSEEFLDKIEREDFLRKQRTEDNGSIPHQIHL | |
| | QELHAILRRQEKYYPFLKENQEKIEKILTFRIPYYVGPLARGNSRFAWLSRK | |
| | SDETITPWNFDEVVDKEASAQAFIERMTNFDKNLPNEKVLPKHSLLYEKFTV | |
| | YNELTKVKYVTEGMRKPEFFSGEQKQEIFDLLFKKNRKVTKKQLKEYLFKEF | |
| | ECFDSVEISGVEDRFNASLGTYHDLLKIIKDKDFLDNEANEEILEDIILTLT | |
| | LFEDREMIKKRLKKYADLFDKKVLKQLKRRRYTGWGRLSAKLINGIRDKQSG | |
| | KTILDYLIDDGFANRNFMQLIHDDSLSFKEEIEKAQVIGDGESLHEVIANLA | |
| | GSPAIKKGILQSLKIVDELVKVMGRHAPENIVIEMARENQTTQKGQKNSRER | |
| | MKRLEEAIKELGSNILKEHPVENTQLQNDKLYLYYLQNGKDMYTGEELDIDR | |
| | LSDYDVDHIVPQSFLKDDSIDNRVLVSSAKARGKSDNVPSEEVVKKMKPYWK | |
| | QLLDAKLITQRKFDNLTKAERGGLTELDKAGFIKRQLVETRQITKHVAQILD | |
| | SRFNTKYDENDKLIRDVKIITLKSKLVSQFRKDFELYKVREINNYHHAHDAY | |
| | LNAVVGTALIKKYPKLESEFVYGDYKVYDVRKMIAKSEQEIGKATAKYFFYS | |
| | NIMNFFKTEVKLANGEIRKRPLIEVNEETGEIAWDKEKDFATVKKVLSMPQV | |
| | NIVKKTEVQTGGFSKESILPKRDSDKLIARKKDWDTKKYGGFDSPTVAYSVL | |
| | VIAKVEKGKAKKLKTVKELVGITIMERSAFEKNPVAFLEAKGYKNIKKDLII | |
| | KLPKYSLFELENGRKRLLASAGELQKGNELALPNKYVTLLYHASHYEKLKGS | |
| | PEDNEEKQLYVEQHKDYFDEILEQISEFSKRYILADANLEKIKKLYEKNRDL | |
| | SIEELAESFINLLTFTALGAPAAFKFFDTTIDRKRYTSTKEILNATLIHQSI | |
| | TGLYETRIDLSKLGGD | |
| CasEnd-172 | MKKKYSIGLDIGTNSVGWAVITDEYKVPSKKFKVLGNTDRQSIKKNLIGALL | 132 |
| | FDSGETAEATRLKRTARRRYTRRKNRIRYLQEIFAEEMSKVDDSFFHRLEES | |
| | FLVEEDKKHERHPIFGNIVDEVAYHEDYPTIYHLRKKLADSTEKADLRLVYL | |
| | ALAHMIKFRGHFLIEGDLNSENSDVDKLFIQLVQTYNQLFEENPINESHVDA | |
| | KAILSAKLSKSRRLENLIAQFPNEKKNGLFGNLIALSLGLTPNFKSNFQLSE | |
| | DAKLQLSKDTYDEDLENLLAQIGDQYADLFLAAKNLSDAILLSDILTVNDES | |
| | TKAPLSASMIKRYDEHHQDLTLLKALVREQLPEKYKEIFFDQSKNGYAGYID | |
| | GGASQEEFYKYIKPILEKMDGSEELLTKINREDFLRKQRTFDNGSIPHQIHL | |
| | QELHAILRRQEKYYPFLKENQEKIEKILTFRIPYYVGPLARGNSRFAWMSRK | |
| | SEETITPWNFEEVVDKEASAQAFIERMTNFDKNLPEEKVLPKHSLLYEKFTV | |
| | YNELTKVKYVTEGMGKPEFLSGEQKQEIVDLLFKKNRKVTVKQLKEDLFKKI | |
| | DCFDSVEISGVEDRFNASLGTYHDLLKIIKDKEFLDNEENEKILEDIVLTLT | |
| | LFEDREMIEERLKKYADLFDKKVLKQLKRRRYTGWGRLSKKLINGIRDKQSG | |
| | KTILDFLKDDGFANRNFMQLIHDDSLTFKEEIQKAQVEGQSDSLHEQIADLA | |
| | GSPAIKKGILQSVKIVDELVKVMGRHKPENIVIEMARENQTTQKGQKNSRER | |
| | MKRLEEGIKELGSQILKEHPVENTQLQSEKLYLYYLQNGKDMYTGEELDIDR | |
| | LSDYDVDHIIPQSFIKDDSIDNKVLTSSEKARGKSDDVPSEEVVKKMKSYWR | |
| | KLLKAKLISQRKFDNLTKAERGGLSELDKAGFIKRQLVETRQITKHVAQILD | |
| | SRFNTEYDENDKLIRDVKIITLKSKLVSDFRKDFQFYKVREINDYHHAHDAY | |
| | LNAVVGTALIKKYPKLESEFVYGDYKVYDVRKMIAKSEQEIGKATAKMFFYS | |
| | NIMNFFKTEITLANGEIRKRPLIETNEETGEIVWDKEKDFATVRKVLSMPQV | |
| | NIVKKTEVQTGGFSKESILPKRESDKLIARKKDWDPKKYGGFDSPTVAYSVL | |
| | VVAKVEKGKSKKLKTVKELVGITIMERSSFEKNPVAFLEKKGYKNVQKDLII | |
| | KLPKYSLFELENGRKRLLASAGELQKGNELALPQKYVTLLYHAKHYEKLKGS | |
| | PEDNEKHREYVEQHKDYFDEILDQIEEFSKRYILADKNLDKILSLYSKNEDA | |
| | PIEELAESFINLFTFTALGAPAAFKFFGTTIDRKRYTSTKEILDATLIHQSI | |
| | TGLYETRIDLSKLGGD | |
| CasEnd-173 | MDKKYSIGLDIGTNSVGWAVITDEYKVPSKKFKVLGNTDRHSIKKNLIGALL | 133 |
| | FDSGETAEATRLKRTARRRYTRRKNRIRYLQEIFAEEMAKVDDSFFHRLEES | |
| | FLVEEDKRNERHPIFGNIVDEVAYHEKYPTIYHLRKKLADSDEKADLRLIYL | |
| | ALAHMIKFRGHFLIEGDLNADNSDVQKLFIQLVQTYNQLFEENPLNEETVDA | |
| | KAILTAKLSKSRRLENLIAQFPGEKKNGLFGNLIALSLGLTPNFKSNFDLAE | |
| | DAKLQLSKDTYDEDLENLLAQIGDQYADLFLAAKNLSDAILLSGILTVNDES | |
| | TKAPLSASMIKRYDEHHQDLTLLKKLVRQQLPEKYKEIFFDQSKNGYAGYID | |
| | GGASQEEFYKYLKPILEKVDGSEEFLDKIEREDFLRKQRTFDNGSIPHQIHL | |
| | GELHAILRRQEKYYPFLKENREKIEKILTFRIPYYVGPLARGNSRFAWMTRK | |
| | SDETITPWNFEEVVDKEASAQDFIERMTNFDKNLPNEKVLPKHSLLYEKFTV | |
| | YNELTKVKYVTEGMRKPEFLSAEQKQEIVDLLFKKNRKVTVKQLKEYLFKEF | |
| | ECFDSVEISGVEDRFNASLGTYHDLLKIIKDKDELDNEENEDILEDIVLTLT | |
| | LFEDREMIEERLKKYADLFDDKVLKQLKRRRYTGWGRLSKKLINGIRDKQSG | |
| | KTILDFLIDDGFANRNFMQLIHDDSLTFKEEIEKAQVSGQGESLHELIANLA | |
| | GSPAIKKGILQSIKIVDELVKVMGRHKPENIVIEMARENQTTQKGQKNSRER | |
| | MKRIEEGIKELGSQILKEHPVENTQLQNEKLYLYYLQNGRDMYVDQELDINR | |
| | LSDYDVDHIVPQSFLKDDSIDNKVLTRSDKARGKSDNVPSEEVVKKMKNYWR | |
| | QLLNAKLITQRKFDNLTKAERGGLSELDKAGFIKRQLVETRQITKHVAQILD | |
| | SRFNTKYDENDKLIRDVKIITLKSKLVSDFRKDFQFYKVREINNYHHAHDAY | |
| | LNAVVGTALIKKYPKLESEFVYGDYKVYDVRKMIAKSEQEIGKATAKYFFYS | |
| | NIMNFFKTEITLANGEIRKRPLIETNEETGEIVWDKGKDFATVRKVLSMPQV | |
| | NIVKKTEVQTGGFSKESILPKRDSDKLIARKKDWDTKKYGGFDSPTVAYSVL | |
| | VVAKVEKGKAKKLKTVKELVGITIMERSSFEKNPVAFLEAKGYKNVKKDLII | |
| | KLPKYSLFELENGRKRLLASAGELQKGNELALPSKYVTLLYLASHYEKLKGS | |
| | PEDNEQKQLFVEQHKDYFDEIIEQISEFSKRYILADANLEKIKSLYEKNRDK | |
| | SIEELAENFIHLLTFTNLGAPAAFKFFDTTIDRKRYTSTKEILNATLIHQSI | |
| | TGLYETRIDLSQLGGD | |
| CasEnd-174 | MKKPYSIGLDIGTNSVGWAVITDDYKVPSKKMKVLGNTDRQSIKKNLLGALL | 134 |
| | FDSGETAEATRLKRTARRRYTRRKNRILYLQEIFAEEMNKVDDSFFHRLEDS | |
| | FLVEEDKRGERHPIFGNIVEEVKYHEKFPTIYHLRKKLADSTEKADLRLVYL | |
| | ALAHIIKFRGHFLIEGDLNAENTDVQKLFKEFVEVYDQTFEESHLVEETIDA | |
| | EMILTEKISKSRRLENLIEQFPGEKKNGLFGNLIALSLGLQPNFKSNEDLSE | |
| | DAKLQFSKDTYDEDLENLLGQIGDEYADVFLAAKNLYDAILLSGILTVNDSS | |
| | TKAPLSASMIKRYDEHHEDLTLLKDFVRENLPEKYKEIFFDESKNGYAGYID | |
| | GGTSQEEFYKYIKPILNKVDGSEYFLDKIDREDFLRKQRTFDNGSIPHQIHL | |
| | YELHAILRRQEKFYPFLKENQEKIEKILTFRIPYYVGPLARGNSRFAWMSRK | |
| | SDETITPWNFDEVVDKEASAEAFIERMTNNDLYLPDEKVLPKHSLLYEKFTV | |
| | YNELTKVKYVTEGMGKAFFFDANQKQEIFDLLFKKNRKVTKKKLLEFLFKEF | |
| | DEFRIVDISGVEKAFNASLGTYHDLLKIIKDKDELDNPENEDILEDIILTLT | |
| | LFEDREMIKERLSKYADLFDKKVLKKLKRRHYTGWGRLSAKLINGIRDKQSG | |
| | KTILDYLIDDGFANRNFMQLIHDDSLSFKEEIQKAQVIGQTDSLHEVVANLA | |
| | GSPAIKKGILQSVKIVDELVKVMGRYNPENIVIEMARENQTTAKGQRNSRER | |
| | LKKLEEAIKELGSQILKEHPVENQQLQNDRLYLYYLQNGKDMYTGEELDIDN | |
| | LSQYDVDHIIPQSFIKDDSIDNRVLVSSAKARGKSDNVPSIEVVKKMKSFWR | |
| | KLLNAKLISQRKFDNLTKAERGGLTEDDKAGFIKRQLVETRQITKHVAQILD | |
| | SRFNTETDENHKLIRKVKIITLKSKLVSDFRKDFGFYKVREINDYHHAHDAY | |
| | LNAVVGKALIKKYPKLEPEFVYGDYPKYNSYKLIAKSEKEEGKATAKKFFYS | |
| | NIMNFFKTEIKLADGTIRERPVIEVNEETGEIVWDKTKHFATVRKVLSMPQV | |
| | NIVKKTEVQTGGFSKESILPKRDSDKLIARKKKWDTKKYGGFDSPTVAYSVL | |
| | VVAKIEKGKNKKLKTVKELVGITIMERSRFEKDPVAFLEDKGYKNVQEDTII | |
| | KLPKYSLFELENGRKRLLASAGELQKGNELALPAHLVTLLYHAKRIEKLDES | |
| | KEDKPKHREYVEQHRHEFDEILDQISEFSNRYILADKNLEKIESLYANNVSA | |
| | SIEELASSFINLLTFTALGAPADFKFFGGTIDRKRYTSTKECLNATLIHQSI | |
| | TGLYETRIDLSKLGGD | |
| CasEnd-175 | MKKKYSIGLDIGTNSVGWAVVTDEYKVPSKKFKVLGNTDRQSIKKNLLGALL | 135 |
| | FDSGETAEATRLKRTARRRYTRRKNRILYLQEIFAEEMNKVDDSFFHRLEES | |
| | FLVEEDKRGERHPIFGNIVEEVAYHEKYPTIYHLRKHLADSDEKADLRLVYL | |
| | ALAHIIKFRGHFLIEGDLNAENTDVQELFKQFLQVYDLTFEEDHLSEETIDA | |
| | EEILTEKVSKSRKLENLLAQFPGEKKNGLFGNLLKLSLGLQPNFKKNENLSE | |
| | DAKLQFSKDTYDEDLENLLGQIGDEYADLFVAAKNLYDAILLSGILTVDDLS | |
| | TKAPLSASMIKRYDEHHQDLTKLKEFVRENLPEKYKEIFFDKSKNGYAGYID | |
| | GGASQEDFYKYLKKLLEKVAGAEYFLEKIEREDFLRKQRTFDNGSIPHQIHL | |
| | QELHAILRRQGEYYPFLKENQEKIEKILTFRIPYYVGPLARGNSRFAWASRK | |
| | SDETITPWNFDEVVDKEKSAEAFIERMTNNDKNLPEEKVLPKHSLLYEKFTV | |
| | YNELTKVKYVTEQMGKSQFFDANMKQEIFDGLFKKERKVTKKKLLDFLDKEF | |
| | DEFRIVDISGVEKAFNASLGTYHDLLKILKDKEFLDNPENEKILEDIVLTLT | |
| | LFEDREMIKKRLRKYADLFTKKQLKKLERRRYTGWGRLSAKLINGIRDKQSG | |
| | KTILDYLIDDGLANRNFMQLIHDDNLSFKDEIAKAQVIGQSDSLHEVIADLA | |
| | GSPAIKKGILQSIKIVDELVKVMGRYEPENIVVEMARENQTTQKGQRNSRER | |
| | LKRLEDALKELGSKILKEHPVENTQLQNDKLYLYYLQNGKDMYTGEELDIDN | |
| | LSDYDVDHIIPQSFIKDDSIDNRVLVSSAEARGKSDDVPSIEVVKKMKPFWE | |
| | KLLKAKLISQRKFDNLTKAERGGLTELDKAGFIKRQLVETRQITKHVAQILD | |
| | ERFNTEFDENNKLIRKVKIVTLKSKLVSNFRKEFGFYKVREINDYHHAHDAY | |
| | LNAVVGKALIKKYPKLESEFVYGDYPVYNSYKMIAKSEQEIGKATAKYFFYS | |
| | NIMNFFKTEITLANGEIRKRPLIETNGETGEIVWDKGRDFATVRKVLSMPQV | |
| | NIVKKTEVQTGGFSKESILPKRNSDKLIARKKDWDPKKYGGFDSPTVAYSVL | |
| | VVAKVEKGKSKKLKSVKELLGITIMERSSFEKNPIDFLEAKGYKEVKKDLII | |
| | KLPKYSLFELENGRKRMLASAGELQKGNELALPSKYVNFLYLASHYEKLKGS | |
| | PEDNEQKQLFVEQHKHYLDEIIEQISEFSKRVILADANLDKVLSAYNKHRDK | |
| | PIREQAENIIHLFTLTNLGAPAAFKYFDTTIDRKRYTSTKEVLDATLIHQSI | |
| | TGLYETRIDLSQLGGD | |
| CasEnd-176 | MDKPYSIGLDIGTNSVGWAVVTDEYKVPSKKFKVLGNTDRHSIKKNLIGALL | 136 |
| | FDSGETAEATRLKRTARRRYTRRKNRIRYLQEIFSEEMVKVDDSFFHRLEES | |
| | FLVEEDKRHERHPIFGNIVEEVAYHEDYPTIYHLRKTLADSTEKADLRLVYL | |
| | ALAHIIKFRGHFLIEGDLDSENSDVQVLFKVLVQTYNILFEENHLSEETVDA | |
| | KAILTDKVSKSRRLENLIKQFPGEKKNGLFGNIIALSLGLTPNFKSNFDLAE | |
| | DAKLQFSKDTYDEDLENLLAQIGDQYADLFLAAKNLYDAILLSGILTVNTEI | |
| | TKAPLSASMIKRYDEHHQDLTLLKKFIRVQLPEKYKEIFFDQSKNGYAGYID | |
| | GGASQEDFYKYIKNILSKLDGTEYFLDKIEREDFLRKQRTFDNGSIPHQIHL | |
| | QELRAILRRQEKFYPFLKENQEKIEKILTFRIPYYVGPLARGNSRFAWATRK | |
| | SNETITPWNFEEVVDKEASAQAFIERMTNFDKNLPNEKVLPKHSLLYEKFTV | |
| | YNELTKVKYVTEGMRKPAFLSSEQKKAIVDLLFKKNRKVTVKQLKEFLFKKI | |
| | DCFDSVEISGVEDRFNASLGTYHDLLKIIKDKEFLDNEENEDILEDIVLTLT | |
| | LFEDREMIEERLKKYADLFDKKVIKQLKRRRYTGWGRLSAKLINGIRDKQSG | |
| | KTILDYLIDDGFANRNFMQLIHDDSLSFKEEIKKAQVIGQTDSLHQVIANLA | |
| | GSPAIKKGILQTIKIVDELVKVMGRYAPENIVIEMARENQTTQKGQRNSRER | |
| | LKRLEEAIKELGSSILKENPVENTQLQNDKLYLYYLQNGKDMYTGEELDIDR | |
| | LSDYDVDHIIPQSFIKDDSIDNRVLTSSEKARGKSDDVPSEEVVKKMKSYWS | |
| | KLLRAKLISQRKFDNLTKAERGGLSELDKAGFIKRQLVETRQITKHVAQILD | |
| | SRFNTKYDENDKLIRTVKIITLKSKLVSDFRKDFEFYKVREINDYHHAHDAY | |
| | LNAVVGTALIKKYPKLESEFVYGDYKVYNSYKMIAKSEQEIGKATAKYFFYS | |
| | NIMNFFKSDITLANGEIRKRPLIETNEETGEIAWNKTKDFATVKKVLSMPQV | |
| | NIVKKTEVQTGGFSKESILPKRESDKLIARKKDWDPKKYGGFDSPTVAYSVL | |
| | VVADVEKGKAKKLKTVKELVGITIMERSSFEKDPVDFLESKGYQNIQKDNII | |
| | KLPKYSLFELENGRKRLLASAGELQKGNELALPAKYVTLLYHASHYEKLKES | |
| | PEDNEKKLRYVEEHREEFDEILDQIEEFSERYILADKNLEKILELYAKNENA | |
| | SISELASSFINLFTFTALGAPAAFKFFGSTIDRKRYTSTKEILNATLIHQSI | |
| | TGLYETRIDLSQLGGD | |
| CasEnd-177 | MDKKYSIGLDIGTNSVGWAVITDEYKVPSKKFKVLGNTDRHSIKKNLIGALL | 137 |
| | FDSGETAEATRLKRTARRRYTRRKNRICYLQEIFSNEMAKVDDSFFHRLEES | |
| | FLVEEDKRGERHPIFGNIVDEVAYHEKYPTIYHLRKHLADSTEKADLRLIYL | |
| | ALAHMIKFRGHFLIEGDLNSENSDVQKLFEQFVQVYDRTFEESHLSEETVDA | |
| | KAILTEKVSKSRRLENLIKQFPNEKKNGLFGNLIALSLGLQPNFKSNEDLSE | |
| | DAKLQFSKDTYDEDLENLLGQIGDQYADLFVAAKNLYDAILLSGILTVNDES | |
| | TKAPLSASMIKRYDEHHQDLTLLKAFVRKQLPEKYKEIFFDESKNGYAGYID | |
| | GGASQEEFYKYIKPILSKIDGSEYFLEKIEREDFLRKQRTFDNGSIPHQIHL | |
| | GELHAILRRQEEYYPFLKENQEKIEKILTFRIPYYVGPLARGNSRFAWMSRK | |
| | SDETITPWNFEEVVDKEASAQAFIERMTNNDKNLPEEKVLPKHSLLYEKFTV | |
| | YNELTKVKYVTEGMGKPEFFDAEQKQEIFDLLFKKNRKVTKKKLLEFLFKEF | |
| | EEFRIVDISGVEDAFNASLGTYHDLLKIIKDKEFLDNEENEDILEDIILTLT | |
| | LFEDREMIEKRLSKYADLFDKKVLKKLKRRRYTGWGRLSAKLINGIRDKQSG | |
| | KTILDYLIDDGFANRNFMQLIHDDSLSFKEEIKKAQVIGQSDSLHEHIANLA | |
| | GSPAIKKGILQTVKVVDELVKVMGRHKPENIVIEMARENQTTQKGQRNSRER | |
| | LKRLEEAIKELGSQILKEHPVDNTQLQNDKLYLYYLQNGKDMYTGEELDIDR | |
| | LSDYDVDHIIPQSFIKDDSIDNRVLTSSAKARGKSDDVPSEEVVKKMKSYWE | |
| | QLLNAKLISQRKFDNLTKAERGGLSELDKAGFIKRQLVETRQITKHVAQILD | |
| | SRMNTKYDENDKLIREVKVITLKSKLVSDFRKDFQFYKVREINNYHHAHDAY | |
| | LNAVVGTALIKKYPKLESEFVYGDYKVYDVRKMIAKSEQEIGKATAKYFFYS | |
| | NIMNFFKTEITLANGEIRKRPLIETNGETGEIVWDKGRDFATVRKVLSMPQV | |
| | NIVKKTEVQTGGFSKESILPKRDSDKLIARKKDWDTKKYGGFDSPTVAYSVL | |
| | VVADIEKGKAKKLKTVKELVGITIMERSSFEKNPVAFLEAKGYKNIQEDTII | |
| | KLPKYSLFELENGRKRLLASAGELQKGNELALPQKYVTLLYHAKRYEKLKEK | |
| | EEDNEKHLEYVEQHREEFDEILDQISEFAERYILADKNLEKIQKLYEKNESY | |
| | SISELASSFINLLTFTALGAPAAFKFFGTTIDRKRYTSTKEILNATLIHQSI | |
| | TGLYETRIDLSKLGGD | |
| CasEnd-178 | MDKKYSIGLDIGTNSVGWAVITDEYKVPSKKFKVLGNTDRQSIKKNLLGALL | 138 |
| | FDSGETAEATRLKRTARRRYTRRKNRIRYLQEIFSEEMVKVDDSFFHRLEES | |
| | FLVEEDKKYERHPIFGNIVDEVAYHEKYPTIYHLRKKLADSTEKADLRLIYL | |
| | ALAHIIKFRGHFLIEGDLNSENSDVDKLFHQLVQTYNQLFEENPINEEGVDA | |
| | KAILSERLSKSRRLENLIAQFPGEKKNGLFGNLIALSLGLTPNFKSNEDLAE | |
| | DAKLQLSKDTYDEDLENLLAQIGDQYADLFLAAKNLSDAILLSGILTVNDES | |
| | TKAPLSASMIKRYDEHHQDLTLLKALVRKQLPEKYKEIFFDKSKNGYAGYID | |
| | GGASQEEFYKYIKPILEKMDGTEEFLAKIEREDFLRKQRTFDNGSIPHQIHL | |
| | GELHAILRRQEEFYPFLKENQEKIEKILTFRIPYYVGPLARGNSRFAWMTRK | |
| | SEETITPWNFEEVVDKEASAESFIERMTNFDKNLPNEKVLPKHSLLYEYFTV | |
| | YNELTKVKYVTEGMGKPEFFSAKQKQEIVDLLFKKNRKVTVKQLKEFLFKKI | |
| | ECFDIVEISGVEDSFNASLGTYHDLLKIIKDKDFLDNEENEDILEDIVLTLT | |
| | LFEDREMIEKRLSKYADLFDKKVLKQLKRRRYTGWGRLSRKLINGIRDKQSG | |
| | KTILDFLKSDGFANRNFMQLIHDDSLTFKEEIEKAQVKGQGDSLHEQIANLA | |
| | GSPAIKKGILQSVKIVDELVKVMGRHKPENIVIEMARENQTTQKGQKNSRER | |
| | MKRLEEGIKELGSQILKEHPVENTQLQNEKLYLYYLQNGKDMYTGDELDIDR | |
| | LSDYDVDHIIPQSFIKDDSIDNKVLTSSAKARGKSDNVPSEEVVKKMKSYWR | |
| | RLLKAKLISQRKFDNLTKAERGGLSELDKAGFIKRQLVETRQITKHVAQILD | |
| | SRFNTEFDENDKLIRDVKIITLKSKLVSDFRKDFQFYKVREINDYHHAHDAY | |
| | LNAVVGTALIKKYPKLESEFVYGDYKVYDSRKMIAKSEQEIGKATAKMFFYS | |
| | NIMNFFKSEIKLADGEIRKRPLIETNEETGEIVWDKEKDFATVRKVLSMPQV | |
| | NIVKKTEVQTGGFSKESILPKRKSDKLIARKKDWDPKKYGGFDSPTVAYSVL | |
| | VVAKIEKGKKKKLKTVKELVGITIMERSSFEKNPVAFLEAKGYKNVQKDLII | |
| | KLPKYSLFELENGRKRLLASAGELQKGNELALPQKYVTFLYLASHYEKLKGS | |
| | PEDEEIKKEYVEQHRHYFDEILEQISEFSERYILADKNLEKILSLYSKNRDL | |
| | SISEQAESFINLFTFTALGAPAAFKFFGGTIDRKRYTSTKEILNATLIHQSI | |
| | TGLYETRIDLSQLGGD | |
| CasEnd-179 | MKKPYSIGLDIGTNSVGWAVVTDEYKVPSKKFKVLGNTDRSSIKKNLLGALL | 139 |
| | FDSGETAEATRLKRTARRRYTRRKNRILYLQEIFAEEMNKVDDSFFHRLEES | |
| | FLVEEDKRGERHPIFGNIVEEVAYHEKYPTIYHLRKHLADSTEKADLRLVYL | |
| | ALAHIIKFRGHFLIEGDLNSENTDVQKLFKKFVEVYDRTFEESHLSEETVDA | |
| | ESILTEKLSKSRKLENLIKQFPNEKKNGLFGNLIALSLGLQPNFKSNFNLSE | |
| | DAKLQFSKDTYDEDLENLLGQIGDEYADLFVAAKNLYDAILLSGILTVNDES | |
| | TKAPLSASMIKRYDEHHQDLTLLKKFIRENLPEKYKEIFFDESKNGYAGYID | |
| | GGASQEEFYKYLKNLLSKIDGSEYFLDKIEREDFLRKQRTFDNGSIPHQIHL | |
| | QELHAILRRQGEYYPFLKENQEKIEKILTFRIPYYVGPLARGNSRFAWASRK | |
| | SDETITPWNFDEVIDKEASAEAFIERMTNNDKNLPNEKVLPKHSLLYEKFTV | |
| | YNELTKVKYVTEGMGKAEFFDANMKQEIFDGLFKKNRKVTKKKLLEFLDKEF | |
| | DEFRIVDISGVEKAFNASLGTYHDLLKIIKDKDFLDNEENEDILEDIVLTLT | |
| | LFEDREMIKKRLSKYADLFDKKVLKKLERRRYTGWGRLSAKLINGIRDKQSG | |
| | KTILDYLIDDGFANRNFMQLIHDDNLSFKEEIAKAQVIGDSDSLHEVIANLA | |
| | GSPAIKKGILQSLKIVDELVKVMGRHNPENIVIEMARENQTTQKGQRNSRER | |
| | LKRLEEAIKELGSNILKEHPVENTQLQNDKLYLYYLQNGKDMYTGEELDIDR | |
| | LSDYDVDHIIPQSFIKDDSIDNRVLTSSAKARGKSDDVPSEEVVKKMKSFWS | |
| | KLLDAKLISQRKFDNLTKAERGGLTELDKAGFIKRQLVETRQITKHVAQILD | |
| | ERFNTEFDENNKLIRKVKIITLKSKLVSNFRKEFELYKVREINDYHHAHDAY | |
| | LNAVVGKALIKKYPKLESEFVYGDYPVYNSYKLIAKSDQEIGKATAKMFFYS | |
| | NIMNFFKSDIKLADGTIIERPDIEVNEETGEIAWDKTKHIATVKKVLSMPQV | |
| | NIVKKTEVQTGGFSKESILPKRNSDKLIARKKDWDTKKYGGFDSPTVAYSVL | |
| | VVADIEKGKSKKLKTVKELVGITIMERSRFEKNPVAFLEDKGYQNIQEDNII | |
| | KLPKYSLFELENGRKRLLASAGELQKGNELALPNKYVTLLYHAKHYEKLKEK | |
| | KEDIEKHLEYVEEHRDEFDEILDQISEFSKRYILADKNLEKIEELYEKNEDA | |
| | SIEELASSFINLLTFTALGAPAAFKFFGKTIDRKRYTSTTEILNATLIHQSI | |
| | TGLYETRIDLSKLGGD | |
| CasEnd-180 | MDKPYSIGLDIGTNSVGWAVITDEYKVPSKKFKVLGNTDRHSIKKNLLGALL | 140 |
| | FDSGETAEATRLKRTARRRYTRRKNRIRYLQEIFAEEMSKVDDSFFHRLEES | |
| | FLVEEDKRGERHPIFGNIVDEVAYHEKYPTIYHLRKHLADSTEKADLRLVYL | |
| | ALAHIIKFRGHFLIEGDLDAENTDVQKLFKKFVQVYDKTFEESHLSEQTVDA | |
| | ESILTDKLSKSRKLENLIKLFPNEKKNGLFGNLIALSLGLQPNFKINFELSE | |
| | DAKLQFSKDTYEEDLENLLGQIGDEYADLFLAAKNLYDAILLSGILTVNTEI | |
| | TKAPLSASMVKRYDEHHQDLTKLKAFIREQLPEKYKEIFFDESKNGYAGYID | |
| | GGAKQEEFYKYLKNLLSKLDGSEYFLDKIEREDFLRKQRTFDNGSIPHQIHL | |
| | QELHAILRRQGEYYPFLKENQEKIEKILTFRIPYYVGPLARGNSRFAWASRK | |
| | SDETITPWNFEEVIDKEKSAEAFIERMTNFDKNLPEEKVLPKHSLLYEKFTV | |
| | YNELTKVKYITEGMRKPAFFDANQKQEIFDLLFKKNRKVTKKKLKEFLFKEF | |
| | DEFRIVDISGVEKAFNASLGTYHDLLKIIKDKEFLDNEENEDILEDIVLTLT | |
| | LFEDREMIEQRLSKYADLFDKKVLKKLERRRYTGWGRLSAKLINGIRDKQSG | |
| | KTILDYLIDDGFANRNFMQLIHDDSLSFKEEIQKAQVIGQSDSLHQVIAELA | |
| | GSPAIKKGILQSLKIVDELVKVMGRYNPENIVIEMARENQTTQKGQRNSRER | |
| | LKRLEESIKELGSKILKEHPVDNTQLQNDKLYLYYLQNGKDMYTGEELDIDR | |
| | LSDYDVDHIIPQSFIKDDSIDNRVLTSSAKARGKSDDVPSEEVVKKMKPFWN | |
| | QLLNAKLISQRKFDNLTKAERGGLSELDKAGFIKRQLVETRQITKHVAQILD | |
| | ERFNTKYDENDKLIRKVKIITLKSKLVSQFRKEFELYKVREINDYHHAHDAY | |
| | LNAVVGKALIKKYPKLESEFVYGDYPVYNSYKMIAKSEQEIGKATAKYFFYS | |
| | NIMNFFKTKVTLANGEIRKRPLIETNEETGEIVWDKEKDIATVRKVLSMPQV | |
| | NIVKKTEVQTGGFSKESILPKRDSDKLIARKKDWDTKKYGGFDSPTVAYSVL | |
| | VIADVEKGKTKKLKTVKELVGITIMERSRFEKNPVAFLEDKGYKNIQKDNII | |
| | KLPKYSLFELENGRKRLLASAGELQKGNELALPQKYVTLLYHAKHYEKLKES | |
| | PEDNEKHLEYVQKHRDEFDEILDQISEFSKRYILADKNLEKILELYSQNADA | |
| | DIEELASSFINLLTFTALGAPAAFKFFDKKIDRKRYTSTTEILNATLIHQSI | |
| | TGLYETRIDLSQLGGD | |
| CasEnd-181 | MDKPYSIGLDIGTNSVGWAVITDEYKVPSKKFKVLGNTDRHSIKKNLLGALL | 141 |
| | FDSGETAEATRLKRTARRRYTRRKNRICYLQEIFAEEMSKVDDSFFHRLEES | |
| | FLVEEDKRDERHPIFGNIVDEVAYHEKYPTIYHLRKKLADSTEKADLRLIYL | |
| | ALAHIIKFRGHFLIEGDLDSENTDVQKLFKALVQTYDQTFEESHLQEETVDA | |
| | ESILTAKISKSRRLENLIKQYPNEKKNGLFGNLIALSLGLQPNFKINFALAE | |
| | DAKLQFSKDTYDEDLENLLAQIGDEYADLFTAAKNLYDAILLSGILTVNTEI | |
| | TKAPLSASMIKRYDEHHQDLTLLKAFIREQLPEKYKEIFFDVTKNGYAGYID | |
| | GGASQEEFYKYLKNILEKVDGSEYFLDKIEREDFLRKQRTFDNGSIPHQIHL | |
| | QELKAILRRQEEYYPFLKENQEKIEKILTFRIPYYVGPLARGNSRFAWMSRK | |
| | SEETITPWNFEEVVDKESSAEAFIERMTNYDKNLPEEKVLPKHSLLYEEFTV | |
| | YNELTKVKYVTEGMRKPAFFDAEQKKEIVDGLFKKNRKVTKKKLKEFLFKEI | |
| | DCFRIVEISGVEKAFNASLGTYHDLLKIIKDKDFLDNEENEKILEDIVLTLT | |
| | LFEDREMIEQRLSKYADLFDKKVLKQLKRRRYTGWGRLSAKLINGIRDKQSG | |
| | KTILDYLIDDGFANRNFMQLIHDDSLSFKEEIQKAQVIGQGDSLHQTIAELA | |
| | GSPAIKKGILQSLKIVDELVKVMGRHNPENIVIEMARENQTTQKGQRNSRER | |
| | LKRLEESIKELGSQILKEHPVENTQLQNDKLYLYYLQNGKDMYTGEELDIDN | |
| | LSDYDVDHIIPQSFIKDDSIDNRVLTSSKKARGKSDNVPSEEVVKKMKSEWN | |
| | RLLDAKLISQRKFDNLTKAERGGLTELDKAGFIKRQLVETRQITKHVAQILD | |
| | SRFNTKYDENDKLIRTVKIITLKSKLVSNFRKEFGFYKVREINDYHHAHDAY | |
| | LNAVVGTALIKKYPKLESEFVYGDYKVYDSYKMIAKSEQEIGKATAKYFFYS | |
| | NIMNFFKTDITLANGEIRKRPLIETNEETGEIVWDKQKDFATVRKVLSMPQV | |
| | NIVKKTEVQTGGFSKESILPKRNSDKLIARKKDWDTKKYGGFDSPTVAYSVL | |
| | VVADIEKGKAKKLKTVKELVGITIMERSSFEKNPIAFLENKGYQNIQKDNII | |
| | KLPKYSLFELENGRKRLLASAGELQKGNELALPNKYVTLLYHAKNYEKLKGS | |
| | PEDNPKHLEYVEQHRSEFDEIFDQISEFSQRYILADKNLEKILELYEQNRER | |
| | DISELASSFINLLTFTALGAPAAFKFFGTTIDRKRYTSTTEILNATLIHQSI | |
| | TGLYETRIDLSQLGGD | |
| | MDKKYSIGLDIGTNSVGWAVVTDEYKVPSKKFKVLGNTDRKSIKKNLLGALL | |
| | FDSGETAEATRLKRTARRRYTRRKNRIRYLQEIFAEEMAKVDDSFFHRLEES | |
| | FLVEEDKRHERHPIFGNIVEEVAYHEKYPTIYHLRKKLADSDEKADLRLVYL | |
| | ALAHIIKFRGHFLIEGDLDSENTDVQKLFKELVETYNQLFEESPLEEEEVDA | |
| | EAILTEKLSKSRRLENLIAQFPGEKKNGLFGNLLALSLGLTPNFKSNEDLEE | |
| | DAKLQFSKDTYDEDLEELLGQIGDEYADLFLAAKNLYDAILLSGILTVKDES | |
| CasEnd-182 | TKAPLSASMVKRYDEHHQDLTLLKQFIRKQLPEKYKEIFFDQSKNGYAGYID | 142 |
| | GGASQEEFYKYLKKILEKIDGSEEFLDKIEREDFLRKQRTFDNGSIPHQIHL | |
| | QELHAILRRQEKYYPFLKENQEKIEKILTFRIPYYVGPLARGNSRFAWLSRK | |
| | SDETITPWNFDEVVDKEASAEAFIERMTNFDKNLPEEKVLPKHSLLYEKFTV | |
| | YNELTKVKYVTEGMRKPEFFDAEQKQEIVDLLFKENRKVTKKQLKEYLFKKF | |
| | ECFDIVEISGVEDRFNASLGTYHDLLKILFDKDFLDNEANEEILEDIILTLT | |
| | LFEDREMIKKRLEKYSDLFDKKQLKKLERRRYTGWGRLSKKLINGIRDKQTG | |
| | KTILDYLIDDGFANRNFMQLIHDDSLTFKEEIEKAQVIGDGESLHEVIANLA | |
| | GSPAIKKGILQSLKIVDEIVKVMGRHNPENIVIEMARENQTTQKGQKNSRER | |
| | MKRIEEGIKELGSQILKEHPVENTQLQNEKLYLYYLQNGRDMYVDQELDINR | |
| | LSDYDVDHIVPQSFLKDDSIDNKVLTRSDKARGKSDNVPSEEVVKKMKNYWR | |
| | QLLNAKLITQRKFDNLTKAERGGLSELDKAGFIKRQLVETRQITKHVAQILD | |
| | SRFNTKYDENDKLIRDVKIITLKSKLVSDFRKDFELYKVREINNYHHAHDAY | |
| | LNAVVGTALIKKYPKLESEFVYGDYKVYDVRKMIAKSEQEIGKATAKYFFYS | |
| | NIMNFFKTEVTLANGEIRKRPLIETNEETGEIVWDKEKDFATVRKVLSMPQV | |
| | NIVKKTEVQTGGFSKESILPKRDSDKLIARKKDWDTKKYGGFDSPTVAYSVL | |
| | VIADVEKGKAKKLKTVKELVGITIMERSAFEKDPIAFLEDKGYKNIKKDNII | |
| | KLPKYSLFELENGRKRLLASAGELQKGNELALPQHYVELLYHASHYEKLKGK | |
| | PEDNEEKQLYVEQHKDYFDEILDQISEFSKRYILADANLEKIKKLYEKNKDA | |
| | SIEELAENFIHLLTFTALGAPAAFKFFGKTIDRKRYTSTKEILNATLIHQSI | |
| | TGLYETRIDLSKLGGD | |
| CasEnd-183 | MKKPYSIGLDIGTNSVGWAVVTDEYKVPSKKFKVLGNTDRQSIKKNLLGALL | 143 |
| | FDSGETAEATRLKRTARRRYTRRKNRILYLQEIFAEEMNKVDDSFFHRLEES | |
| | FLVEEDKRGERHPIFGNIVEEVAYHEKYPTIYHLRKELADSDEKADLRLVYL | |
| | ALAHMIKFRGHFLIEGDLDSENTDVQKLFKQFLEAYDNTFEESHLSEETVDI | |
| | EEILTEKLSKSRKLENLLALFPNEKKNGIFGELLKLILGLQPNFKKNFGLSE | |
| | DAKLQFSKDTYDEDLEELLGQIGDEYADLFVAAKNLYDAILLSGILTVDDLS | |
| | TKAPLSASMVKRYDEHHQDLTLLKQFIRKQLPEKYKEIFFDKSKNGYAGYID | |
| | GGASQEDFYKYLKKLLEKIDGSEYFLDKIDREDFLRKQRTFDNGSIPHQIHL | |
| | EELKAIIRRQGEYYPFLKENQEKIEKILTFRIPYYVGPLARGNSRFAWASRK | |
| | SDETITPWNFDEVVDKEKSAEAFIERMTNNDKNLPTEKVLPKHSLLYEKFTV | |
| | YNELTKVKYVTEQMGKAKFFDANMKQEIFDGLFKKYRKVTKKKLLEFLDKEF | |
| | DEFRIVDISGVEKAFNASLGTYHDLLKIIKDKEFLDDEDNEKILEDIILTLT | |
| | LFEDREMIRKRLEKYADLFDKKQLKKLERRRYTGWGRLSAKLINGIRDKQTG | |
| | KTILDYLIDDGRSNRNFMQLIHDDSLSFKEEIAKAQLIGDSDSLHEVIADLA | |
| | GSPAIKKGILQSLKIVDELVKVMGRYNPENIVVEMARENQTTQKGQRNSRER | |
| | LKRLEEAIKNLGSDILKEYPVDNTQLQNDKLYLYYLQNGKDMYTGEELDIDN | |
| | LSDYDVDHIIPQSFIKDDSIDNRVLVSSKKARGKSDDVPSEDVVNKMKPFWK | |
| | KLLKAKLISQRKYDNLTKAERGGLTELDKAGFIKRQLVETRQITKHVAQILD | |
| | ERFNTEFDENNKLIRDVKIITLKSKLVSQFRKEFGLYKVREINDYHHAHDAY | |
| | LNAVVGKALIKKYPKLESEFVYGDYPVYNSYKMIAKSEQEIGKATAKYFFYS | |
| | NIMNFFKTEITLANGEIRKRPLIETNGETGEIVWDKGRDFATVRKVLSMPQV | |
| | NIVKKTEVQTGGFSKESILPKRNSDKLIARKKDWDPKKYGGFDSPTVAYSVL | |
| | VVAKVEKGKSKKLKSVKELLGITIMERSSFEKNPIDFLEAKGYKEVKKDLII | |
| | KLPKYSLFELENGRKRMLASAGELQKGNELALPSKYVNFLYLASHYEKLKGS | |
| | PEDNEQKQLFVEQHKHYLDEIIEQISEFSKRVILADANLDKVLSAYNKHRDK | |
| | PIREQAENIIHLFTLTNLGAPAAFKYFDTTIDRKRYTSTKEVLDATLIHQSI | |
| | TGLYETRIDLSQLGGD | |
| CasEnd-184 | MKKPYSIGLDIGTNSVGWAVVTDDYKVPAKKMKVLGNTDKEYIKKNLLGALL | 144 |
| | FDSGNTAEDRRLKRTARRRYTRRRNRILYLQEIFSEEMNKVDESFFHRLEDS | |
| | FLVPEDKRGERHPIFGDLEEEVKYHEDFPTIYHLRKELADSPEKADLRLVYL | |
| | ALAHIIKYRGHFLIEGELDTRNNDIQKLFQEFLAVYDNTFENSSLSEQNVQV | |
| | EEILTDKISKSAKKDRVLKLFPNEKSNGLFAEFLKLIVGNQADFKKHFELEE | |
| | KAPLQFSKDSYDEDLEGLLGQIGDEYADLFLSAKKLYDAILLSGILTVTDVS | |
| | TKAPLSASMIQRYVEHQEDLKKLKQFIRTNLPAKYNEVENDKSKDGYAGYID | |
| | GKTNQEDFYKYLKKLLTKVAGSEYFLEKIEREDFLRKQRTFDNGSIPHQIHL | |
| | QEMKAIIRRQAEYYPFLKENQDKIEKILTFRIPYYVGPLARGNSDFAWASRK | |
| | SDEKITPWNEDDIIDKESSAEAFINRMTNYDLYLPEEKVLPKHSLLYEKFTV | |
| | YNELTKVRYITEQMGETEFFDANMKQEIFDGLFKKYRKVTKKKLLNFLEKEF | |
| | DEFRIVDITGLDKAFNASLGTYHDLLKILKDKEFLDDPANEEILEDIVQTLT | |
| | LFEDREMIKKRLSKYSDLFDKKQLKKLERRHYTGWGRLSAKLINGIRDKQTR | |
| | KTILDYLIDDGNSNRNFMQLINDDGLSFKEEIAKAQVIGESDNLKQVVQDLA | |
| | GSPAIKKGILQSLKIVDELVKIMGGYNPESIVVEMARENQFTNRGRRNSQQR | |
| | LKKLTDSIKELGSNILKEHPVDNSQLQNDRLFLYYLQNGKDMYTGEALDIDY | |
| | LSQYDIDHIIPQAFIKDDSLDNRVLVSSAKARGKSDDVPSKDVVKKMKSFWN | |
| | KLLDAKLISQRKFDNLTKAERGGLTDDDKAGFIKRQLVETRQITKHVARILD | |
| | ERFNTELDENNKKIRKVKIVTLKSNLVSNFRKEFELYKVREINDYHHAHDAY | |
| | LNAVVAKALLGKYPKLEPEFVYGEYPKYNSHKYVSQTDEERNTATAKKFFYS | |
| | NIMNFFKSDVKLADGSEVERPQIERNDETGEIVWDKTKHVEIVKKVLSYPQV | |
| | NIVKKVEEQTGGFSKESILPKGNSDKLIPRKTKWDTKKYGGFDSPTVAYSVL | |
| | VIADIEKGKSKKLKTVKELVGITIMEKKKFEKDPVAFLERKGYQNIQEENII | |
| | KLPKYSLFELENGRRRLLASAKELQKGNEIVLPNHLVKLLYHAKHIHSIDEK | |
| | NEEIKKHLQYVKKHRQEFSELLDEVKDFSKKYVLAEKNLEKIEELYAKNEQA | |
| | SVEELANSFINLLTFTAMGAPATFKFFGTTIDRKRYTSTTEILNATLIHQSI | |
| | TGLYETRIDLSKLGED | |
| CasEnd-185 | MKKPYSIGLDIGTNSVGWAVVTDDYKVPSKKMKVLGNTDRQSIKKNLLGALL | 145 |
| | FDSGETAEATRLKRTARRRYTRRKNRILYLQEIFSEEMSKVDESFFHRLEDS | |
| | FLVEEDKRNERHPIFGNIVDEVAYHEKFPTIYHLRKHLADSTEKADLRLVYL | |
| | ALAHIIKFRGHFLIEGDLDSENTDVQKLFKQFVQVYNKTFEESHLSEETVDA | |
| | EAILTEKLSKSRKLENLLAQFPNEKKNGLFGNLIALSLGLQPNFKSNFELSE | |
| | DAKLQFSKDTYDEDLDNLLGQIGDEYADVFVAAKNLYDAILLSGILTVNDLS | |
| | TKAPLSASMIKRYEEHHEDLTKLKNFVRKNLPEKYKEIFFDKSKNGYAGYID | |
| | GGTSQEEFYKYIKKNLSKVDGSEYFLEKIDREDFLRKQRTFDNGSIPHQIHL | |
| | GELHAILRRQEEYYPFLKENQEKIEKILTFRIPYYVGPLARGNSRFAWMTRK | |
| | SDETITPWNFDEVVDKEASAQAFIERMTNNDLYLPTEKVLPKHSLLYEKFTV | |
| | YNELTKVKYVTEGMGKTKFFDANQKKEIFDGLFKKNRKVTKKKLLNFLFKEF | |
| | DEFRIVDISGVEDAFNASLGTYHDLLKIIKDKEFLDNEENEKILEDIVLTLT | |
| | LFEDREMIKKRLLKYADLFDKKVLKKLERRHYTGWGRLSAKLINGIRDKQTG | |
| | KTILDFLIDDGFANRNFMQLIHDDNLSFKEEIQKAQVIGQEDSLHEVVAELA | |
| | GSPAIKKGILQSLKIVDELVKVMGRHAPENIVVEMARENQTTAKGQRNSRER | |
| | LKRLEEAMKELGSSILKEHPVENSQLQNDRLYLYYLQNGKDMYTGEELDIDR | |
| | LSDYDVDHIIPQSFIKDDSIDNRVLTSSAKARGKSDDVPSEEVVKKMKSFWY | |
| | QLLNAKLISQRKFDNLTKAERGGLTEDDKAGFIKRQLVETRQITKHVAQILD | |
| | ERFNTEFDENDKLIRDVKIVTLKSKLVSNFRKEFQFYKVREINDYHHAHDAY | |
| | LNAVVGKALIKKYPKLEPEFVYGDYPKYNSYKMFAKSEKERGKATAKMFFYS | |
| | NIMNFFKTDIKLADGQIIKRPQIETNEETGEIVWDKGKDFATVKKVLSMPQV | |
| | NIVKKTEVQTGGFSKESILPKRNSDKLIARKKGWDTKKYGGFDSPTVAYSVL | |
| | VVADIEKGKAKKLKTVKELVGITIMERSRFEKNPVAFLEDKGYQNIRKDSII | |
| | KLPKYSLFELENGRKRLLASAGELQKGNELALPNKLVTLLYHAKNLEKLDEK | |
| | DEDNPKHREYVNQHREEFKEIFQQISEFSKRYILADKNLEKILELYEKNENK | |
| | SISELASSFINLLTFTALGAPAAFKFFDKTIDRKRYTSTKEILNATLIHQSI | |
| | TGLYETRIDLSKLGGD | |
| CasEnd-186 | MKKPYSIGLDIGTNSVGWAVITDDYKVPSKKMKVLGNTDRSSIKKNLLGALL | 146 |
| | FDSGETAEATRLKRTARRRYTRRKNRIRYLQEIFAEEMNKVDDSFFHRLEDS | |
| | FLVEEDKRGERHPIFGNIVEEVAYHEKFPTIYHLRKYLADSTEKADLRLVYL | |
| | ALAHIIKFRGHFLIEGDLNPENTDVQKLFKKFVTTYDKTFEESHLSEETVDA | |
| | EAILTEKLSKSRKLENLLKQFPKEKKNGLFGNLIALSLGLQPNFKSNFQLSE | |
| | DAKLQFSKDTYDEDLENLLAQIGDEYADLFVAAKNLYDAILLSGILTVNDES | |
| | TKAPLSASMIKRYEEHHEDLTLLKAFIRKQLPEKYKEIFFDKSKNGYAGYID | |
| | GGTSQEEFYKYLKPLLEKLDGSEYFLDKIEREDFLRKQRTFDNGSIPHQIHL | |
| | KELHAILRRQAEYYPFLKENQEKIEKILTFRIPYYVGPLARGNSRFAWASRK | |
| | SDETITPWNFDEVIDKEASAEAFIERMTNFDLYLPEEKVLPKHSLLYEKFTV | |
| | YNELTKVKYVTEGMGESQFFDAELKQEIFDGLFKKYRKVTKKKLLEFLDKEF | |
| | EEFRIVDISGVEKRFNASLGTYHDLLKIIKDKEFLDNPENEDILEDIVLTLT | |
| | LFEDREMIEQRLQKYADLFDKKVLKKLERRHYTGWGRLSAKLINGIRDKQTG | |
| | KTILDYLIDDGYANRNFMQLIHDDSLTFKEEIAKAQVIGNSDSLHEVVANLA | |
| | GSPAIKKGILQSLKIVDELVKVMGRYAPENIVIEMARENQTTAKGQRNSRER | |
| | LKRLEEAIKKLGSNILKEHPVENAQLQNDRLYLYYLQNGKDMYTGEELDINN | |
| | LSDYDVDHIIPQSFIKDDSIDNRVLTSSKKARGKSDDVPSIEVVKKMKSFWS | |
| | KLLNAKLISQRKFDNLTKAERGGLTEDDKAGFIKRQLVETRQITKHVAQILD | |
| | SRFNTERDENNKLIRKVKIITLKSKLVSNFRKDFGLYKVREINDYHHAHDAY | |
| | LNAVVGTALIKKYPKLEPEFVYGDYPKYNSYKMIRKSESERGKATAKMFFYS | |
| | NIMNFFKTDIKLADGRIEERPVIEVNEETGEIVWDKGKHFATVKKVLSMPQV | |
| | NIVKKTEVQTGGFSKESILPKRDSDKLIARKKKWDPKKYGGFDSPTVAYSVL | |
| | VVADIEKGKSKKLKTVKELVGITIMERSRFEKNPIAFLESKGYKNIQEDNII | |
| | KLPKYSLFELENGRKRLLASAGELQKGNELALPNKLVTLLYHAKHIENLKEK | |
| | PEDNEKKLEYVEQHRSEFDEILDQISEFSKRYILADKNLEKIEELYHKNNSK | |
| | SIEELAESFINLFTFTALGAPAAFKFFGATIDRKRYTSTTECLNATLIHQSI | |
| | TGLYETRIDLSKLGGD | |
| CasEnd-187 | MDKKYSIGLDIGTNSVGWAVITDEYKVPSKKFKVLGNTDRHSIKKNLIGALL | 147 |
| | FDSGETAEATRLKRTARRRYTRRKNRICYLQEIFSNEMAKVDDSFFHRLEES | |
| | FLVEEDKRNERHPIFGNIVDEVAYHEKYPTIYHLRKKLADSDEKADLRLIYL | |
| | ALAHMIKFRGHFLIEGDLNSDNSDVQKLFKQLVQVYNQLFEESPLNEETVDA | |
| | KAILTEKLSKSRRLENLIAQFPGEKKNGLFGNLIALSLGLTPNFKSNFDLAE | |
| | DAKLQFSKDTYDEDLENLLGQIGDEYADLFLAAKNLYDAILLSGILTVNDES | |
| | TKAPLSASMVKRYDEHHQDLTLLKAFVRQQLPEKYKEIFFDQSKNGYAGYID | |
| | GGASQEEFYKYLKKILEKVDGSEEFLAKINREDFLRKQRTFDNGSIPHQIHL | |
| | GELHAILRRQEKYYPFLKENREKIEKILTFRIPYYVGPLARGNSRFAWMTRK | |
| | SDETITPWNFDEVVDKEASAQAFIERMTNFDKNLPDEKVLPKHSLLYEKFTV | |
| | YNELTKVKYVTEGMRKPEFFSAEQKQEIVDLLFKKNRKVTKKQLKEYLFKEF | |
| | ECFDIVEISGVEDRFNASLGTYHDLLKIIFDKDFLDNEENEKILEDIVLTLT | |
| | LFEDREMIKERLEKYADLFDDKQLKQLKRRRYTGWGRLSKKLINGIRDKQSG | |
| | KTILDYLIDDGFANRNFMQLIHDDSLTFKEEIEKAQVSGQGDSLHEHIANLA | |
| | GSPAIKKGILQTVKVVDELVKVMGRHKPENIVIEMARENQTTQKGQKNSRER | |
| | MKRIEEGIKELGSQILKEHPVENTQLQNEKLYLYYLQNGRDMYVDQELDINR | |
| | LSDYDVDHIVPQSFLKDDSIDNKVLTRSDKARGKSDNVPSEEVVKKMKNYWR | |
| | QLLNAKLITQRKFDNLTKAERGGLSELDKAGFIKRQLVETRQITKHVAQILD | |
| | SRMNTKYDENDKLIREVKVITLKSKLVSDFRKDFQFYKVREINNYHHAHDAY | |
| | LNAVVGTALIKKYPKLESEFVYGDYKVYDVRKMIAKSEQEIGKATAKYFFYS | |
| | NIMNFFKTEITLANGEIRKRPLIETNGETGEIVWDKGRDFATVRKVLSMPQV | |
| | NIVKKTEVQTGGFSKESILPKRNSDKLIARKKDWDPKKYGGFDSPTVAYSVL | |
| | VVAKVEKGKSKKLKSVKELLGITIMERSSFEKNPIDFLEAKGYKEVKKDLII | |
| | KLPKYSLFELENGRKRMLASAGELQKGNELALPSKYVNFLYLASHYEKLKGS | |
| | PEDNEQKQLFVEQHKHYLDEIIEQISEFSKRVILADANLDKVLSAYNKHRDK | |
| | PIREQAENIIHLFTLTNLGAPAAFKYFDTTIDRKRYTSTKEVLDATLIHQSI | |
| | TGLYETRIDLSQLGGD | |
| CasEnd-188 | MDKPYSIGLDIGTNSVGWAVVTDEYKVPSKKFKVLGNTGRKSIKKNLWGVLL | 148 |
| | FDSGETAEATRLKRTARRRYTRRKNRICYLQEIFSNEMAKVDDSFFHRLEES | |
| | FLVEEDKKHERHPIFGNIVDEVAYHEKYPTIYHLRKKLVDSTDKADLRLIYL | |
| | ALAHMIKFRGHFLIEGDLNPDNSDVDKLFIQLVQTYNQLFEENPINASGVDA | |
| | KAILSARLSKSRRLENLIAQLPGEKKNGLFGNLIALSLGLTPNFKSNFDLAE | |
| | DAKLQLSKDTYDDDLDNLLAQIGDQYADLFLAAKNLSDAILLSDILRVNTEI | |
| | TKAPLSASMIKRYDEHHQDLTLLKALVRQQLPEKYKEIFFDQSKNGYAGYID | |
| | GGASQEEFYKFIKPILEKMDGTEELLVKLNREDLLRKQRTFDNGSIPHQIHL | |
| | GELHAILRRQEDFYPFLKDNREKIEKILTFRIPYYVGPLARGNSRFAWMTRK | |
| | SEETITPWNFEEVVDKGASAQSFIERMTNFDKNLPNEKVLPKHSLLYEYFTV | |
| | YNELTKVKYVTEGMRKPAFLSGEQKKAIVDLLFKTNRKVTVKQLKEDYFKKI | |
| | ECFDSVEISGVEDRFNASLGTYHDLLKIIKDKDFLDNEENEDILEDIVLTLT | |
| | LFEDREMIEERLKTYAHLFDDKVMKQLKRRRYTGWGRLSRKLINGIRDKQSG | |
| | KTILDFLKSDGFANRNFMQLIHDDSLTFKEDIQKAQVSGQGESLHEQIANLA | |
| | GSPAIKKGILQSIKIVDEIVKVMGRYAPENIVVEMARENQTTQKGQKNSRER | |
| | MKRIEEGIKELGSQILKEHPVENTQLQNEKLYLYYLQNGRDMYVDQELDINR | |
| | LSDYDVDHIVPQSFLKDDSIDNKVLTRSDKARGKSDNVPSEEVVKKMKNYWR | |
| | QLLNAKLITQRKFDNLTKAERGGLTELDKAGFIKRQLVETRQITKHVAQILD | |
| | ERFNAEYDDNGKLIRDTKIVTLKSKLVSNFRKDFELYKIREVNNYHHAHDAY | |
| | LNAVVGQALIKKYPKLESEFVYGDYPVYDVNKLIRKSNREIGKATEKMFFYS | |
| | NIMNFFKSDVKLADGDVRKRPIVEVNEETGEIVWDKNKHLATIKKVLSMPQV | |
| | NIVKKTEVQTGGFSKESILPKRNSDKLIARKKDWDPKKYGGFDSPTVAYSVL | |
| | VVAKVEKGKSKKLKSVKELLGITIMERSSFEKNPIDFLEAKGYKEVKKDLII | |
| | KLPKYSLFELENGRKRMLASAGELQKGNELALPSKYVNFLYLASHYEKLKGS | |
| | PEDNEQKQLFVEQHKHYLDEIIEQISEFSKRVILADANLDKVLSAYNKHRDK | |
| | PIREQAENIIHLFTLTNLGAPAAFKYFDTTIDRKRYTSTKEVLDATLIHQSI | |
| | TGLYETRIDLSQLGGD | |
| CasEnd-189 | MKKKYSIGLDIGTNSVGWAVITDEYKVPSKKFKVLGNTDRQSIKKNLIGALL | 149 |
| | FDSGETAEATRLKRTARRRYTRRKNRIRYLQEIFAEEMAKVDDSFFHRLEES | |
| | FLVEEDKKHERHPIFGNIVDEVAYHEKYPTIYHLRKKLVDSTEKADLRLIYL | |
| | ALAHMIKFRGHFLIEGDLNPENSDVDKLFIQLVQTYNQLFEENPINESGVDA | |
| | KAILSAKLSKSRRLENLIAQLPGEKKNGLFGNLIALSLGLTPNFKSNFDLSE | |
| | DAKLQLSKDTYDDDLENLLGQIGDQYADLFLAAKNLSDAILLSDILRVNTES | |
| | TKAPLSASMIKRYDEHHQDLTLLKALVRQQLPEKYKEIFFDKSKNGYAGYID | |
| | GGASQEEFYKFIKPILEKMDGTEELLAKLNREDLLRKQRTFDNGSIPHQIHL | |
| | GELHAILRRQEEFYPFLKENREKIEKILTFRIPYYVGPLARGNSRFAWMTRK | |
| | SDETITPWNFEEVVDKGASAQSFIERMTNFDKNLPNEKVLPKHSLLYEYFTV | |
| | YNELTKVKYVTEGMGKPEFLSGEQKKEIVDLLFKKDRKVTVKQLKEDYFKEI | |
| | ECFDSVEISGVEDRFNASLGTYHDLLKIIKDKDFLDNEENEDILEDIVLTLT | |
| | LFEDREMIEERLKKYANLEDDKVMKQLKRRRYTGWGRLSRKLINGIRDKQSG | |
| | KTILDFLKSDGFANRNFMQLIHDDSLTFKEAIQKAQVIGQGDSLHEQIANLA | |
| | GSPAIKKGILQTVKVVDELVKVMGRHKPENIVIEMARENQTTQKGQKNSRER | |
| | MKRIEEGIKELGSQILKEHPVENTQLQNEKLYLYYLQNGRDMYTGDELDINR | |
| | LSDYDVDHIVPQSFLKDDSIDNKVLTRSKKARGKSDNVPSEEVVKKMKNYWR | |
| | QLLKAKLITQRKFDNLTKAERGGLSELDKAGFIKRQLVETRQITKHVAQILD | |
| | SRMNTKRDENDKLIRDVKVITLKSKLVSDFRKDFQFYKVREINNYHHAHDAY | |
| | LNAVVGTALIKKYPKLESEFVYGDYKVYDVRKMIAKSEQEIGKATAKYFFYS | |
| | NIMNFFKTEIKLANGEIRKRPLIETNEETGEIVWDKERDFATVRKVLSMPQV | |
| | NIVKKTEVQTGGFSKESILPKRDSDKLIARKKDWDPKKYGGFDSPTVAYSVL | |
| | VVAKIEKGKSKKLKTVKELLGITIMERSSFEKDPVAFLEDKGYKNVKKDLII | |
| | KLPKYSLFELENGRKRMLASAGELQKGNELALPSKYVNFLYLASHYEKLKGS | |
| | PEDNEQKQLYVEQHKHYLDEIIDQISEFSERVILADKNLEKVLSAYNEIRDK | |
| | SIREQAENIIHLFTLTNLGAPAAFKYFDTTIDRKRYTSTKEVLDATLIHQSI | |
| | TGLYETRIDLSQLGGD | |
| CasEnd-190 | MKKPYSIGLDIGTNSVGWAVVTDEYKVPSKKFKVLGNTDRSSIKKNLLGALL | 150 |
| | FDSGETAEATRLKRTARRRYTRRKNRILYLQEIFAEEMNKVDDSFFHRLEES | |
| | FLVEEDKRGERHPIFGNIVEEVAYHEEYPTIYHLRKYLADSTEKADLRLVYL | |
| | ALAHIIKFRGHFLIEGDLDAENTDVQKLFYDFVQAYNNTFEESHLSEATVDA | |
| | SEILTEKISKSRRLENLLKNFPTEKKNGFFGNLVALSLGLQPNFKINFELSE | |
| | DAKLQFSKDTYDEDLENLLGQIGDEYADLFVAAKNLYDAILLSGILTVNDES | |
| | TKAPLSASMIKRYDEHHQDLTQLKKFIREKLPEKYKEIFFDESKNGYAGYID | |
| | GGASQEEFYKYLKNLLSKIDGSEYFLDKIEREDFLRKQRTFDNGSIPHQIHL | |
| | QELHAILRRQGEYYPFLKENQEKIEKILTFRIPYYVGPLARGNSRFAWASRK | |
| | SDETITPWNFDEVVDKESSAEAFIERMTNNDKNLPNEKVLPKHSLLYEKFTV | |
| | YNELTKVKYVTEQMGKAKFFDANQKQEIVDLLFKKERKVTKKKLLDFLFKEF | |
| | DEFRIVDISGVEKAFNASLGTYHDLLKILKDKDFLDNEENEDILEDIVLTLT | |
| | LFEDREMIKQRLQKYEDLFDKKQLKKLERRRYTGWGRLSAKLINGIRDKQTG | |
| | KTILDYLIDDGRANRNFMQLIHDDNLSFKEEIAKAQVIGESDSLHQVIADLA | |
| | GSPAIKKGILQSLKIVDELVKVMGRYNPENIVVEMARENQTTQKGQRNSRER | |
| | LKRLEESIKKLGSKILKEHPVDNTQLQNDKLYLYYLQNGKDMYTGEELDIDR | |
| | LSDYDVDHIIPQSFIKDDSIDNRVLTSSAKARGKSDDVPSIDVVKKMKPFWQ | |
| | KLLDAKLISQRKFDNLTKAERGGLTELDKAGFIKRQLVETRQITKHVAQILD | |
| | SRFNTEFDENNKLIRKVKIITLKSKLVSNFRKEFELYKVREINDYHHAHDAY | |
| | LNAVVGKALIKKYPKLESEFVYGDYPVYNSYKVMAESNSEIGKATEKMFFYS | |
| | NIMNFFKSEVKLADGQIFERPQIEVNEETGEIAWDKVKHIRTVRKVLSMPQV | |
| | NIVKKTEVQTGGFSKESILPKRDSDKLIARKKDWDTKKYGGFDSPTVAYSVL | |
| | VVADIEKGKSKKLKTVKELVGITIMERSRFEKNPVAFLESKGYQNIQKDNII | |
| | KLPKYSLFELENGRKRLLASAGELQKGNELALPQHYVTLLYHAKHYEKLKEK | |
| | SEDIPKHLEYVKNHKQEFKELLNQISEFSERYILADKNLEKIRELYAKNQDA | |
| | SVEELASSFINLLTFTALGAPAAFKFFGKNIDRKRYTSTTECLNATLIHQSI | |
| | TGLYETRIDLSKLGED | |
| CasEnd-191 | MKKKYSIGLDIGTNSVGWAVITDEYKVPSKKFKVLGNTDRQSIKKNLIGALL | 151 |
| | FDSGETAEATRLKRTARRRYTRRKNRIRYLQEIFAEEMAKVDDSFFHRLEES | |
| | FLVEEDKKHERHPIFGNIVDEVAYHEKYPTIYHLRKKLVDSTEKADLRLIYL | |
| | ALAHMIKFRGHFLIEGDLNSENSDVDKLFIQLVQTYNQLFEENPINESGVDA | |
| | KAILSAKLSKSRRLENLIAQFPGEKKNGLFGNLIALSLGLTPNFKSNFDLAE | |
| | DAKLQLSKDTYDDDLENLLAQIGDQYADLFLAAKNLSDAILLSDILRVNTEI | |
| | TKAPLSASMIKRYDEHHQDLTLLKALVRQQLPEKYKEIFFDKSKNGYAGYID | |
| | GGASQEEFYKFIKPILEKMDGTEELLAKLNREDLLRKQRTFDNGSIPHQIHL | |
| | GELHAILRRQEEFYPFLKENREKIEKILTFRIPYYVGPLARGNSRFAWMTRK | |
| | SEETITPWNFEEVVDKGASAQSFIERMTNFDKNLPTEKVLPKHSLLYEYFTV | |
| | YNELTKVKYVTEGMRKPEFLSGEQKKEIVDLLFKKNRKVTVKQLKEDYFKKI | |
| | ECFDSVEISGVEDRFNASLGTYHDLLKIIKDKEFLDNEENEDILEDIVLTLT | |
| | LFEDREMIEERLKKYANLFDKKVMKQLKRRRYTGWGRLSRKLINGIRDKQSG | |
| | KTILDFLKSDGFANRNFMQLIHDDSLTFKEEIKKAQVIGQGDSLHEQIANLA | |
| | GSPAIKKGILQTVKVVDELVKVMGRHKPENIVIEMARENQTTQKGQKNSRER | |
| | MKRIEEGIKELGSQILKEHPVENTQLQNEKLYLYYLQNGRDMYTGDELDINR | |
| | LSDYDVDHIVPQSFLKDDSIDNKVLTRSKEARGKSDNVPSEEVVKKMKSYWR | |
| | QLLNAKLITQRKFDNLTKAERGGLSELDKAGFIKRQLVETRQITKHVAQILD | |
| | SRMNTKRDENDKLIRDVKVITLKSKLVSDFRKDFQFYKVREINNYHHAHDAY | |
| | LNAVVGTALIKKYPKLESEFVYGDYKVYDVRKMIAKSEQEIGKATAKYFFYS | |
| | NIMNFFKTEIKLANGEIRKRPLIETNEETGEIVWDKERDFATVRKVLSMPQV | |
| | NIVKKTEVQTGGFSKESILPKRESDKLIARKKDWDPKKYGGFDSPTVAYSVL | |
| | VVAKVEKGKTKKLKTVKELLGITIMERSSFEKDPVAFLEAKGYKEVKKDLII | |
| | KLPKYSLFELENGRKRMLASAGELQKGNELALPSKYVNFLYLASHYEKLKGK | |
| | PEDNEKKQLYVEQHKHYLDEIIDQISEFSERVILADKNLDKVLSAYNNERDK | |
| | SIREQAENIIHLFTLTNLGAPAAFKYFGTTIDRKRYTSTKEVLDATLIHQSI | |
| | TGLYETRIDLSQLGGD | |
| CasEnd-192 | MDKKYSIGLDIGTNSVGWAVVTDEYKVPSKKFKVLGNTDRHSIKKNLIGALL | 152 |
| | FDSGETAEATRLKRTARRRYTRRKNRILYLQEIFAEEMAKVDDSFFHRLEES | |
| | FLVEEDKRNERHPIFGNIVDEVAYHEKYPTIYHLRKELADSPEKADLRLVYL | |
| | ALAHIIKFRGHFLIEGDLNAENSDVQKLFDQLVQTYNQLFEESPLEEEGVDA | |
| | KAILTEKLSKSRRLENLIAEFPGEKKNGLFGNLIALSLGLTPNFKSNEDLSE | |
| | DAKLQLSKDTYDEDLEELLGQIGDEYADLFLAAKNLYDAILLSGILTVSDEI | |
| | TKAPLSASMVKRYDEHHQDLTLLKDLIRKQLPEKYKEIFFDQSKNGYAGYID | |
| | GGASQEEFYKYLKKILEKIDGSEEFLDKIEREDFLRKQRTFDNGSIPHQIHL | |
| | QELHAILRRQEKYYPFLKENREKIEKILTFRIPYYVGPLARGNSRFAWMSRK | |
| | SDETITPWNFEEVVDKEASAQAFIERMTNFDKNLPNEKVLPKHSLLYEKFTV | |
| | YNELTKVKYVTEGMRKPEFLSAEQKQEIVDLLFKKNRKVTVKQLKEYLFKEF | |
| | ECFDIVEISGVEDRFNASLGTYHDLLKIIKDKDFLDNPENEEILEDIVLTLT | |
| | LFEDREMIKQRLKKYADLFDKKQLKKLSRRRYTGWGRLSKKLINGIRDKQSG | |
| | KTILDYLKDDGFANRNFMQLIHDDSLTFKEEIKKAQVIGQGESLHELIANLA | |
| | GSPAIKKGILQSLKIVDEIVKVMGRYEPENIVIEMARENQTTQKGQKNSRER | |
| | MKRIEEGIKELGSQILKEHPVENTQLQNEKLYLYYLQNGRDMYVDQELDINR | |
| | LSDYDVDHIVPQSFLKDDSIDNKVLTRSDKARGKSDNVPSEEVVKKMKNYWR | |
| | QLLNAKLITQRKFDNLTKAERGGLSELDKAGFIKRQLVETRQITKHVAQILD | |
| | SRFNTKYDENDKLIRDVKIITLKSKLVSDFRKDFQLYKVREINNYHHAHDAY | |
| | LNAVVGTALIKKYPKLESEFVYGDYKVYDVRKMIAKSEREIGKATAKYFFYS | |
| | NIMNFFKSEITLANGEIRKRPLIEVNEETGEIVWDKEKDFATVRKVLSMPQV | |
| | NIVKKTEVQTGGFSKESILPKRNSDKLIARKKDWDTKKYGGFDSPTVAYSVL | |
| | VVAKVEKGKAKKLKTVKELVGITIMERSAFEKNPIAFLEAKGYKEIKKDLII | |
| | KLPKYSLFELENGRKRMLASAGELQKGNELALPQKYVTLLYHASHYEKLKGS | |
| | PEDNEEKQLFVEQHKHYFDEILEQISEFSKRYILADANLEKIKKLYEKNRDL | |
| | SIEELAENFIHLLTFTALGAPAAFKFFDTTIDRKRYTSTKEILNATLIHQSI | |
| | TGLYETRIDLSQLGGD | |
| CasEnd-193 | MDKKYSIGLDIGTNSVGWAVITDEYKVPSKKFKVLGNTDRHSIKKNLIGALL | 153 |
| | FDSGETAEATRLKRTARRRYTRRKNRICYLQEIFSNEMAKVDDSFFHRLEES | |
| | FLVEEDKKHERHPIFGNIVEEVAYHEKYPTIYHLRKKLADSDEKADLRLIYL | |
| | ALAHMIKFRGHFLIEGDLNSENSDVDKLFIQLVQTYNQLFEENPINASGVDA | |
| | KAILSARLSKSRRLENLIAQLPGEKKNGLFGNLIALSLGLTPNFKSNEDLAE | |
| | DAKLQLSKDTYDDDLDNLLAQIGDQYADLFLAAKNLSDAILLSDILRVNTEI | |
| | TKAPLSASMIKRYDEHHQDLTLLKALVRQQLPEKYKEIFFDQSKNGYAGYID | |
| | GGASQEEFYKFIKPILEKMDGTEELLVKLNREDLLRKQRTFDNGSIPHQIHL | |
| | GELHAILRRQEDFYPFLKDNREKIEKILTFRIPYYVGPLARGNSRFAWMTRK | |
| | SEETITPWNFEEVVDKGASAQSFIERMTNFDKNLPNEKVLPKHSLLYEYFTV | |
| | YNELTKVKYVTEGMRKPAFLSGEQKKAIVDLLFKTNRKVTVKQLKEDYFKKI | |
| | ECFDSVEISGVEDRFNASLGTYHDLLKIIKDKDFLDNEENEDILEDIVLTLT | |
| | LFEDREMIEERLKTYAHLFDDKVMKQLKRRRYTGWGRLSRKLINGIRDKQSG | |
| | KTILDFLKSDGFANRNFMQLIHDDSLTFKEDIQKAQVSGQGESLHEQIANLA | |
| | GSPAIKKGILQTIKIVDELVKVMGRHKPENIVIEMARENQTTQKGQKNSRER | |
| | MKRIEEGIKELGSQILKEHPVENTQLQNEKLYLYYLQNGRDMYVDQELDINR | |
| | LSDYDVDHIVPQSFLKDDSIDNKVLTRSDKARGKSDNVPSEEVVKKMKNYWR | |
| | QLLNAKLITQRKFDNLTKAERGGLSELDKAGFIKRQLVETRQITKHVAQILD | |
| | SRFNTEYDENDKLIRDVKIITLKSKLVSDFRKDFQLYKVREINNYHHAHDAY | |
| | LNAVVGTALIKKYPKLESEFVYGDYKVYDVRKMIAKSEQEIGKATAKYFFYS | |
| | NIMNFFKTDVTLANGEIRKRPLIEVNEETGEIVWDKEKDFATVKKVLSMPQV | |
| | NIVKKTEVQTGGFSKESILPKRDSDKLIARKKDWDTKKYGGEDSPTVAYSVL | |
| | VIAKVEKGKAKKLKTVKELVGITIMERSSFEKDPVAFLEAKGYKDIQKELII | |
| | KLPKYSLFELENGRKRLLASAGELQKGNELALPNKYVTLLYHAKHYEKLKGS | |
| | PEDNKYKQIYVEQHQEYFDEIIDQIIEFSKRYILADANLEKLKSLYEKNRDA | |
| | SIEELAENFIHLLTFTNLGAPAAFKFFDTTIDRKRYTSTKEILNATLIHQSI | |
| | TGLYETRIDLSQLGGD | |
| CasEnd-194 | MKKPYSIGLDIGTNSVGWAVVTDDYKVPSKKMKVLGNTDRQSIKKNLIGALL | 154 |
| | FDSGETAEATRLKRTARRRYTRRKNRIRYLQEIFAEEMNKVDDSFFHRLEES | |
| | FLVEEDKKGERHPIFGNIVDEVKYHEKFPTIYHLRKHLADSTEKADLRLVYL | |
| | ALAHIIKFRGHFLIEGDLNARNTDVQKLFEQFVQVYDDTFEESHLSEETVDA | |
| | KAILTEKVSKSRRLENLIAQFPGEKKNGLFGNLIALSLGLQPNFKSNFELSE | |
| | DAKLQFSKDTYDEDLENLLGQIGDGYADLFVAAKNLYDAILLSGILTVNDES | |
| | TKAPLSASMIKRYDEHHKDLTKLKEFIRKQLPEKYKEIFFDQTKNGYAGYID | |
| | GGTSQEEFYKYIKKLLSKMDGSEYFLDKIEREDFLRKQRTFDNGSIPHQIHL | |
| | GELHAILRRQGEYYPFLKENQEKIEKILTFRIPYYVGPLARGNSRFAWASRK | |
| | SDETITPWNFEEVVDKEASAQAFIERMTNNDLYLPDEKVLPKHSLLYEKFTV | |
| | YNELTKVKYVTEGMGKAEFFSANLKQEIFDGLFKKYRKVTKKKLLEFLFKEF | |
| | DEFRIVDISGVEKAFNASLGTYHDLLKIIKDKEFLDDEENEEILEDIVLTLT | |
| | LFEDREMIRQRLSKYADLFDKKVLKKLERRHYTGWGRLSAKLINGIRDKQSG | |
| | KTILDYLIDDGFANRNFMQLIHDDRLTFKEEIKKAQVIGDGDSLHEIVAELA | |
| | GSPAIKKGILQSLKIVDELVKVMGRYNPENIVIEMARENQTTAKGQRNSRER | |
| | LKRLEEAIKDLGSNILKEHPVENTQLQNDRLYLYYLQNGKDMYTGEELDIDR | |
| | LSQYDVDHIIPQSFIKDDSIDNRVLTSSAKARGKSDNVPSIEVVKKMKSYWN | |
| | RLLNAKLISQRKFDNLTKAERGGLSEDDKAGFIKRQLVETRQITKHVAQILD | |
| | SRFNTEFDENNKLIRDVKIITLKSKLVSQFRKDFELYKVREINDYHHAHDAY | |
| | LNAVVGKALIKKYPKLEPEFVYGDYPKYNSYKMVGKSKQERGKATAKVFFYS | |
| | NIMNFFKSDVKLADGRIVERPVIETNEETGEIVWDKVKDIATVRKVLSMPQV | |
| | NIVKKTEVQTGGFSKESILPKRNSDKLIARKKKWDPKKYGGFDSPTVAYSVL | |
| | VVADIEKGKAKKLKTVKELVGITIMERSAFEKDPVAFLEDKGYQNIQKDLII | |
| | KLPKYSLFELENGRKRLLASAGELQKGNELALPNKLVTLLYHAKHIEKLTGK | |
| | PEDQEKKLQYVEEHKHDFDEILSQISEFSKRYILADKNLEKIEELYHKNRDA | |
| | SIEELASSFINLFTFTALGAPAAFKFLGTTIDRKRYTSTTECLNATLIHQSI | |
| | TGLYETRIDLSKLGGD | |
| CasEnd-195 | MKKPYSIGLDIGTNSVGWAVITDEYKVPSKKFKVLGNTDRQSIKKNLIGALL | 155 |
| | FDSGETAEATRLKRTARRRYTRRKNRICYLQEIFSEEMSKVDDSFFHRLEES | |
| | FLVEEDKRHERHPIFGNIVDEVAYHENYPTIYHLRKKLADSTEKADLRLIYL | |
| | ALAHMIKFRGHFLIEGDLNSENTDVQKLFIQLVQTYNQLFEENPIEEEGVDA | |
| | KAILSAKLSKSRRLENLIALLPGEKKNGLFGNLIALSLGLTPNFKSNFELAE | |
| | DAKLQLSKDTYDEDLENLLAQIGDQYADLFLAAKNLSDAILLSDILTVNDVI | |
| | TKAPLSASMIKRYDEHHQDLTLLKALVRQQLPEKYKEIFFDDSKNGYAGYID | |
| | GGASQEEFYKYIKPILEKMDGTEYLLAKIEREDFLRKQRTFDNGSIPHQIHL | |
| | GELHAILRRQEDFYPFLKENREKIEKILTFRIPYYVGPLARGNSRFAWLKRK | |
| | SEETITPWNFEEVVDKEASAQAFIERMTNFDKNLPNEKVLPKHSLLYEYFTV | |
| | YNELTKVKYVTEGMGKPEFLSGEQKEEIVDLLFKKNRKVTVKQLKEDYFKKI | |
| | ECFDSVEISGVEDRFNASLGTYHDLLKIIKDKDELDNEENEDILEDIVLTLT | |
| | LFEDREMIEERLKKYAHLFDKKVLKKLKRRRYTGWGRLSRKLINGIRDKQSG | |
| | KTILDFLKSDGFANRNFMQLIHDDSLTFKEEIKKAQVKGQGESLHEVIADLA | |
| | GSPAIKKGILQSVKIVDELVKVMGRHNPENIVIEMARENQTTQKGQKNSRER | |
| | MKRIEEGIKELGSQILKEHPVENTQLQNEKLYLYYLQNGRDMYVDQELDINR | |
| | LSDYDVDHIVPQSFLKDDSIDNKVLTRSDKARGKSDNVPSEEVVKKMKNYWR | |
| | QLLNAKLITQRKFDNLTKAERGGLSELDKAGFIKRQLVETRQITKHVAQILD | |
| | SRFNTERDENDKLIREVKIITLKSKLVSDFRKDFGFYKVREINNYHHAHDAY | |
| | LNAVVGTALIKKYPKLESEFVYGDYKVYDVRKMIAKSEQEIGKATAKYFFYS | |
| | NIMNFFKTEITLANGEIRKRPLIETNEETGEIVWDKERDFATVRKVLSMPQV | |
| | NIVKKTEVQTGGFSKESILPKRNSDKLIARKKDWDTKKYGGFDSPTVAYSVL | |
| | VVAKVEKGKSKKLKTVKELVGITIMERSSFEKNPIAFLEKKGYKNVQKELII | |
| | KLPKYSLFELENGRKRLLASAGELQKGNELALPSHYVTLLYLAKNYEKLKGK | |
| | IEDLSKHLEYVEQHKEYFDEIFDQIIEFSERYILADKNLSKILELYDENREK | |
| | DIKELAENFIHLLTFTSLGAPAAFKFFDTTIDRKRYTSTTEILNATLIHQSI | |
| | TGLYETRIDLSQLGGD | |
| CasEnd-196 | MDKKYSIGLDIGTNSVGWAVITDEYKVPSKKFKVLGNTDRHSIKKNLIGALL | 156 |
| | FDSGETAEATRLKRTARRRYTRRKNRICYLQEIFSNEMAKVDPSFFHRLEES | |
| | FLVEEDKRGERHPIFGNIVEEVAYHEKYPTIYHLRKHLADSDEKADLRLVYL | |
| | ALAHIIKFRGHFLIEGDLNAENSDVQKLFKELVQIYDQTFEESHLSEETVDA | |
| | EAILTEKLSKSRRLENLIAQFPGEKKNGLFGNLIKLSLGLTPNFKSNEDLEE | |
| | DAKLQFSKDTYDEDLEELLGQIGDEYADLFVAAKNLYDAILLSGILTVSDSS | |
| | TKAPLSASMVKRYDEHHQDLTLLKEFIREQLPEKYKEIFFDQSKNGYAGYID | |
| | GGASQEEFYKYLKKILEKIDGSEEFLDKIEREDFLRKQRTFDNGSIPHQIHL | |
| | QELHAIIRRQEKYYPFLKENKEKIEKILTFRIPYYVGPLARGNSRFAWLSRK | |
| | SDETITPWNFDEVVDKEASAEAFIERMTNFDKNLPDEKVLPKHSLLYEKFTV | |
| | YNELTKVKYVTEGGKKPEFFDANQKQEIVDNLFKKYRKVTKKQLLEYLEKEF | |
| | DEFRIVEISGVEDRFNASLGTYHDLLKIIFDKDFLDNEENEEILEDIVLTLT | |
| | LFEDREMIKKRLEKYADLFDKKQIKKLSRRRYTGWGRLSAKLINGIRDKQTG | |
| | KTILDYLIDDGFANRNFMQLIHDDSLSFKEEIEKAQVIGDGDSLHEHIANLA | |
| | GSPAIKKGILQTVKVVDELVKVMGRHKPENIVIEMARENQTTQKGQKNSRER | |
| | MKRIEEGIKELGSQILKEHPVENTQLQNEKLYLYYLQNGRDMYVDQELDINR | |
| | LSDYDVDHIVPQSFLKDDSIDNKVLTRSDKARGKSDNVPSEEVVKKMKNYWR | |
| | QLLNAKLITQRKFDNLTKAERGGLSELDKAGFIKRQLVETRQITKHVAQILD | |
| | SRMNTKYDENDKLIREVKVITLKSKLVSDFRKDFQFYKVREINNYHHAHDAY | |
| | LNAVVGTALIKKYPKLESEFVYGDYKVYDVRKMIAKSEQEIGKATAKYFFYS | |
| | NIMNFFKTEITLANGEIRKRPLIETNGETGEIVWDKGRDFATVRKVLSMPQV | |
| | NIVKKTEVQTGGFSKESILPKRDSDKLIARKKDWDTKKYGGFDSPTVAYSVL | |
| | VVADIEKGKAKKLKTVKELVGITIMERSAFEKNPIAFLESKGYQNIQKDNII | |
| | KLPKYSLFELENGRKRLLASAGELQKGNELALPNHYVTLLYHAKHYEKLKGS | |
| | PEDNEEHQIYVEQHRDEFDEILDQISEFSKRYILADANIEKLKKLYEKNRDA | |
| | SIEELAENFIHLLTFTALGAPAAFKFFGKNIDRKRYTSTKEILNATLIHQSI | |
| | TGLYETRIDLSKLGGD | |
| CasEnd-197 | MDKKYSIGLDIGTNSVGWAVITDEYKVPSKKFKVLGNTDRHSIKKNLIGALL | 157 |
| | FDSGETAEATRLKRTARRRYTRRKNRICYLQEIFSNEMAKVDDSFFHRLEES | |
| | FLVEEDKKHERHPIFGNIVDEVAYHEKYPTIYHLRKKLVDSTDKADLRLIYL | |
| | ALAHMIKFRGHFLIEGDLNPDNSDVDKLFIQLVQTYNQLFEENPINASGVDA | |
| | KAILSARLSKSRRLENLIAQLPGEKKNGLFGNLIALSLGLTPNFKSNEDLAE | |
| | DAKLQLSKDTYDDDLDNLLAQIGDQYADLFLAAKNLSDAILLSDILRVNTEI | |
| | TKAPLSASMIKRYDEHHQDLTLLKALVRQQLPEKYKEIFFDQSKNGYAGYID | |
| | GGASQEEFYKFIKPILEKMDGTEELLVKLNREDLLRKQRTFDNGSIPHQIHL | |
| | GELHAILRRQEDFYPFLKDNREKIEKILTFRIPYYVGPLARGNSRFAWMTRK | |
| | SEETITPWNFEEVVDKGASAQSFIERMTNFDKNLPNEKVLPKHSLLYEYFTV | |
| | YNELTKVKYVTEGMRKPAFLSGEQKKAIVDLLFKTNRKVTVKQLKEDYFKKI | |
| | ECFDSVEISGVEDRFNASLGTYHDLLKIIKDKDFLDNEENEDILEDIVLTLT | |
| | LFEDREMIEERLKTYAHLFDDKVMKQLKRRRYTGWGRLSRKLINGIRDKQSG | |
| | KTILDFLKSDGFANRNFMQLIHDDSLTFKEDIQKAQVSGQGDSLHEHIANLA | |
| | GSPAIKKGILQTVKVVDELVKVMGRHKPENIVIEMARENQTTQKGQKNSRER | |
| | MKRIEEGIKELGSQILKEHPVENTQLQNEKLYLYYLQNGRDMYVDQELDINR | |
| | LSDYDVDHIVPQSFLKDDSIDNKVLTRSDKARGKSDNVPSEEVVKKMKNYWR | |
| | QLLNAKLITQRKFDNLTKAERGGLSELDKAGFIKRQLVETRQITKHVAQILD | |
| | SRMNTKYDENDKLIREVKVITLKSKLVSDFRKDFQFYKVREINNYHHAHDAY | |
| | LNAVVGTALIKKYPKLESEFVYGDYKVYDVRKMIAKSEQEIGKATAKYFFYS | |
| | NIMNFFKTEITLANGEIRKRPLIETNGETGEIVWDKGRDFATVRKVLSMPQV | |
| | NIVKKTEVQTGGFSKESILPKRNSDKLIARKKDWDTSKYGGFDSPTVAYSVL | |
| | VIAKVEKGKSKKLKTVKELVGITIMERSAFEKDPVAFLENKGYQNVQKELII | |
| | KLPKYSLFELENGRKRLLASAGELQKGNELALPNHYVTLLYHAKNYEKIKGS | |
| | EEDEKRKQIYVEDHRYEFDEILDQVSEFSERYILADANLEKITNLYEKNIEA | |
| | SIEELASSFLNLLKFTKLGAPAAFKFFGTTIDRKRYTSTKEILNATLIHQSI | |
| | TGLYETRIDLSKLGGD | |
| CasEnd-198 | MDKKYSIGLDIGTNSVGWAVITDEYKVPSKKFKVLGNTDRHSIKKNLIGALL | 158 |
| | FDSGETAEATRLKRTARRRYTRRKNRICYLQEIFSNEMAKVDPSFFERLEES | |
| | FLVEEDKKTSRHPIFGNIVEEVAYHEKYPTIYHLRKKLVDSDEKADLRLIYL | |
| | ALAHMIKFRGHFLIEGDLNPDNSDVDKLFIQLVQTYNQLFEENPINASGVDA | |
| | KAILSARLSKSRRLENLIAQLPGEKKNGLFGNLIALSLGLTPNFKSNEDLAE | |
| | DAKLQLSKDTYDDDLDNLLAQIGDQYADLFLAAKNLSDAILLSDILRVNTEE | |
| | TKAPLSASMIKRYDDHHQDLTKLKELVRKELPEKYKTIFFNQNANGYAGYID | |
| | GGATQEEFYAAIKPILESMSGTKDLLEKLDNRDLLRKQRTFDNGSIPHQIHL | |
| | GELRAILERQEKFYPFLKENREKIEKILTFRIPYYVGPLARGNSRFAWMTRK | |
| | SEETITPWNFEEVVDKGASAQSFIERMTNFDKNLPNEKVLPKHSLLYEYFTV | |
| | YNELTKVKYVTEGMRKPAFLSGEQKKAIVDLLFKTNRKVTVKQLKEDYFKKI | |
| | ECFDSVEISGVEDRFNASLGTYHDLLKIIKDKDFLDNEENEDILEDIVLTLT | |
| | LFEDREMIEERLKTYAHLFDDKVMKQLKRRRYTGWGRLSRKLINGIRDKQSG | |
| | KTILDFLKSDGFANRNFMQLIHDDSLTFKEDIQKAQVSGQGDSLHEHIANLA | |
| | GSPAIKKGILQTVKVVDELVKVMGRHKPENIVIEMARENQTTQKGQKNSRER | |
| | MKRIEEGIKELGSQILKEHPVENTQLQNEKLYLYYLQNGRDMYVDQELDINR | |
| | LSDYDVDHIVPQSFLKDDSIDNKVLTRSDKARGKSDNVPSEEVVKKMKNYWR | |
| | QLLNAKLITQRKFDNLTKAERGGLSELDKAGFIKRQLVETRQITKHVAQILD | |
| | SRMNTKYDENDKLIREVKVITLKSKLVSDFRKDFQFYKVREINNYHHAHDAY | |
| | LNAVVGTALIKKYPKLESEFVYGDYKVYDVRKMIAKSEQEIGKATAKYFFYS | |
| | NIMNFFKTEITLANGEIRKRPLIETNGETGEIVWDKGRDFATVRKVLSMPQV | |
| | NIVKKTEVQTGGFSKESILPKRDSDKLIARKKDWDPKKYGGFDSPTVAYSVL | |
| | VVAKKEVGEKKKLKKVKELLGITIMERSKFEKDPLKFLEEKGYKDVKEDEII | |
| | KLPKYSLFELGNGRKRMLASAGELQKGNELALPSEYVNFLYLASDYEKLKGD | |
| | PEEKEKKQKYVEENKQYLDDIINQISEFSKRVIKADANLEKVLKAYEKHKDK | |
| | PIKEQAENIIHLFTLTRLGAPAAFKYFDEKIDRKRYTSTKEVLDATLIHQSI | |
| | TGLYETRIDLKFLGGD | |
| CasEnd-199 | MDKKYSIGLDIGTNSVGWAVVTDEYKVPSKKFKVLGNTDRHSIKKNLLGALL | 159 |
| | FDSGETAEATRLKRTARRRYTRRKNRIRYLQEIFAEEMAKVDDSFFHRLEES | |
| | FLVEEDKRNERHPIFGNIVEEVAYHEKYPTIYHLRKKLADSTEKADLRLVYL | |
| | ALAHMIKFRGHFLIEGDLNSENSDVQKLFEQLVQTYNQLFEESPLEEEKVDA | |
| | KAILTEKLSKSRRLENLIANFPGEKKNGLFGNLIALSLGLTPNFKSNEDLSE | |
| | DAKLQLSKDTYDEDLENLLAQIGDQYADLFVAAKNLSDAILLSGILTVNDES | |
| | TKAPLSASMVKRYDEHHQDLTLLKKFVRDQLPEKYKEIFFDQSKNGYAGYID | |
| | GGASQEEFYKYIKPILEKVDGSEEFLDKIEREDFLRKQRTFDNGSIPHQIHL | |
| | QELHAILRRQEEYYPFLKENQEKIEKILTFRIPYYVGPLARGNSRFAWMSRK | |
| | SDETITPWNFEEVVDKEASAQKFIERMTNFDKNLPNEKVLPKHSLLYEKFTV | |
| | YNELTKVKYVTEGMRKPEFLSGEQKQEIVDLLFKKERKVTVKQLKEYLFKEF | |
| | DCFDSVEISGVEDRFNASLGTYHDLLKIIKDKDFLDNEENEDILEDIILTLT | |
| | LFEDREMIKKRLEKYADLFDKKVLKQLKRRRYTGWGRLSAKLINGIRDKQSG | |
| | KTILDYLIDDGFANRNFMQLIHDDSLTFKEEIEKAQVIGKGDSLHEQIANLA | |
| | GSPAIKKGILQTLKIVDELVKVMGRHAPENIVIEMARENQTTQKGQKNSRER | |
| | MKRIEEGIKELGSQILKEHPVENTQLQNEKLYLYYLQNGRDMYVDQELDINR | |
| | LSDYDVDHIVPQSFLKDDSIDNKVLTRSDKARGKSDNVPSEEVVKKMKNYWR | |
| | QLLNAKLITQRKFDNLTKAERGGLSELDKAGFIKRQLVETRQITKHVAQILD | |
| | SRFNTKYDENDKLIRDVKIITLKSKLVSDFRKDFELYKVREINNYHHAHDAY | |
| | LNAVVGTALIKKYPKLESEFVYGDYKVYDVRKMIAKSEQEIGKATAKYFFYS | |
| | NIMNFFKTDITLANGEIRKRPLIETNEETGEIVWDKEKDFATVRKVLSMPQV | |
| | NIVKKTEVQTGGFSKESILPKRDSDKLIARKKDWDTKKYGGFDSPTVAYSVL | |
| | VIAKVEKGKAKKLKTVKELVGITIMERSAFEKDPVAFLEAKGYQNIKKDLII | |
| | KLPKYSLFELENGRKRLLASAGELQKGNELALPQKYVTLLYHAKHYEKLKGK | |
| | PEDNEEKQLYVEQHKYYFDEIFDQISEFSKRYILADANLEKLISLYEKNRDK | |
| | SIEELAENFIHLLTFTALGAPAAFKFFDTTIDRKRYTSTKEILNATLIHQSI | |
| | TGLYETRIDLSKLGGD | |
| CasEnd-200 | MKKKYSIGLDIGTNSVGWAVITDEYKVPSKKFKVLGNTDRQSIKKNLIGALL | 160 |
| | FDSGETAEATRLKRTARRRYTRRKNRIRYLQEIFAEEMNKVDDSFFHRLEES | |
| | FLVEEDKRHDRHPIFGNIVDEVAYHENYPTIYHLRKELVDSPEKADLRLIYL | |
| | ALAHMIKFRGHFLIEGDLNSENTDVQKLFKQLVQTYNQLFEEKPLNEETVDA | |
| | EAILSEKLSKSRRLENLIAQFPGEKKNGLFGNLIALSLGLTPNFKSNFELSE | |
| | DAKLQLSKDTYDEDLENLLGQIGDEYADLFLAAKNLYDAILLSGILRVKDES | |
| | TKAPLSASMIKRYDEHHQDLTLLKALVRQQLPEKYKEIFFDASKNGYAGYID | |
| | GGASQEEFYKFIKPILSKMDGTEYLLDKLEREDLLRKQRTFDNGSIPHQIHL | |
| | QELHAILRRQEEYYPFLKENQEKIEKILTFRIPYYVGPLARGNSRFAWMTRK | |
| | SDETITPWNFEEVVDKGASAQAFIERMINNDKNLPNEKVLPKHSLLYEKFTV | |
| | YNELTKVKYVTEGMGKPEFLSGEQKKEIVDLLFKKERKVTVKKLKEFYFKEF | |
| | EEFRIVEISGVEDRFNASLGTYHDLLKIIKDKDFLDNEENEDILEDIVLTLT | |
| | LFEDREMIEKRLEKYANLFDKKVMKQLKRRRYTGWGRLSAKLINGIRDKQSG | |
| | KTILDFLISDGFANRNFMQLIHDDSLTFKEEIKKAQEIGQGDSLHEQIADLA | |
| | GSPAIKKGILQTVKVVDELVKVMGRHKPENIVIEMARENQTTQKGQKNSRER | |
| | LKRIEEGIKKLGSDILKEYPVENTQLQNDKLYLYYLQNGRDMYTGEELDIDR | |
| | LSDYDVDHIVPQSFIKDDSIDNKVLTRSKEARGKSDDVPSEDVVKKMKSYWR | |
| | QLLKAKLITQRKFDNLTKAERGGLTELDKAGFIKRQLVETRQITKHVAQILD | |
| | SRMNTEYDENNKLIRDVKVITLKSKLVSDFRKDFQFYKVREINDYHHAHDAY | |
| | LNAVVGTALIKKYPKLESEFVYGDYKVYDVRKMIAKSEQEIGKATAKYFFYS | |
| | NIMNFFKTEITLANGEIRKRPLIETNGETGEIVWDKGRDFATVRKVLSMPQV | |
| | NIVKKTEVQTGGFSKESILPKRNSDKLIARKKDWDPKKYGGFDSPTVAYSVL | |
| | VVAKVEKGKSKKLKSVKELLGITIMERSSFEKNPIDFLEAKGYKEVKKDLII | |
| | KLPKYSLFELENGRKRMLASAGELQKGNELALPSKYVNFLYLASHYEKLKGS | |
| | PEDNEQKQLFVEQHKHYLDEIIEQISEFSKRVILADANLDKVLSAYNKHRDK | |
| | PIREQAENIIHLFTLTNLGAPAAFKYFDTTIDRKRYTSTKEVLDATLIHQSI | |
| | TGLYETRIDLSQLGGD | |
| CasEnd-201 | MDKKYSIGLDIGTNSVGWAVITDEYKVPSKKFKVLGNTDRKSIKKNLIGALL | 161 |
| | FDSGETAEATRLKRTARRRYTRRKNRICYLQEIFSSEMAKVDDSFFHRLEES | |
| | FLVEEDKRHERHPIFGNIVEEVAYHEKYPTIYHLRKKLVDSDDKADLRLIYL | |
| | ALAHMIKFRGHFLIEGDLNPDNSDVDKLFIQLLQTYNQLFEENPIEAEDIDA | |
| | KAILTERLSKSRRLENLIAQLPNEKKNGLFGNLIALSLGLTPNFKSNEDLAE | |
| | DAKLQLSKDTYDEDLENLLGQIGDQYADLFLAAKNLYDAILLSDILRVNTEI | |
| | TKAPLSASMIKRYDEHHQDLTLLKALVRQQLPEKYKEIFFDQSKNGYAGYID | |
| | GGASQEEFYKFIKPILEKMDGTEELLVKLEREDLLRKQRTFDNGSIPHQIHL | |
| | GELHAILRRQEDFYPFLKDNREKIEKILTFRIPYYVGPLARGNSRFAWMTRK | |
| | SDETITPWNFEEVVDKGASAQSFIERMTNFDKNLPNEKVLPKHSLLYEYFTV | |
| | YNELTKVKYVTEGMRKPAFLDGEQKKEIVDLLFKTNRKVTVKQLKEDFFKKI | |
| | DCFDSVEISGVEDRFNASLGTYHDLLKIIKDKDELDNEENEDILEDIVLTLT | |
| | LFEDREMIEKRLKTYANLFDKKVMKQLKRRRYTGWGRLSRKLINGIRDKQSG | |
| | KTILDFLKSDGFANRNFMQLIHDDSLTFKEDIQKAQVSGQGDSLHEQIANLA | |
| | GSPAIKKGILQTLKVVDELVKVMGRYKPENIVIEMARENQTTQKGQKNSRER | |
| | MKRIEEGIKELGSDILKEHPVENTQLQNEKLYLYYLQNGRDMYTDQELDINR | |
| | LSDYDVDHIVPQSFLKDDSIDNKVLTSSEKARGKSDDVPSEEVVKKMKPYWR | |
| | QLLNAKLITQRKFDNLTKAERGGLSELDKAGFIKRQLVETRQITKHVAQILD | |
| | SRMNTKYDENDKLIRDVKVITLKSKLVSDFRKDFQFYKVREINNYHHAHDAY | |
| | LNAVVGTALIKKYPKLESEFVYGDYKVYDVKKMIAKSDREIGKATAKYFFYS | |
| | NIMNFFKSDVKLADGTIRKRPLIEVNEETGEIVWDKGRDFATVRKVLSMPQV | |
| | NIVKKTEVQTGGFSKESILPKRNSDKLIARKKDWDPSKYGGEDSPTVAYSVL | |
| | VIAKIEKGKAKKLKSVKELLGITIMERSSFEKNPVDFLEAKGYQNIQKELII | |
| | KLPKYSLFELENGRKRLLASAGELQKGNELALPNKYVDFLYHASHYEKLKGS | |
| | PEDEKYSQLFVEQHRHYFDELFEQIIEFSERYILADANLEKIKNLYEKHSEL | |
| | SIREQAENILNLFTFTNLGAPAAFKYFDTDIDRKRYTSTKEILNATLIHQSI | |
| | TGLYETRIDLSQLGGD | |
| CasEnd-202 | MKKSYSIGLDIGTNSVGWAVVTDDYKVPSKKMKVLGNTDRSSIKKNLLGALL | 162 |
| | FDSGETAEATRLKRTARRRYTRRKNRILYLQEIFAEEMNKVDDSFFHRLEDS | |
| | FLVEEDKRNERHPIFGNIVEEVAYHEEFPTIYHLRKHLADSTEKADLRLVYL | |
| | ALAHMIKFRGHFLIEGDLNAENSDVQKLENDFVQHYNQTFEESPLSEETVDA | |
| | ESILTDKVSKSRKLENLIKQFPGEKKNGLFGNLIALSLGLQPNFKINFELSE | |
| | DAKLQFSKDTYDEDLENLLGQIGDEYADLFVAAKNLYDAILLSGILTVNDDS | |
| | TKAPLSASMIKRYEEHHEDLTLLKAFVRKNLPEKYKEIFFDKSKNGYAGYID | |
| | GGTSQEEFYKYLKKILEKVDGSEYFLDKIEREDFLRKQRTFDNGSIPHQIHL | |
| | QELKAILRRQETYYPFLKENQEKIEKILTFRIPYYVGPLARGNSRFAWMTRK | |
| | SDETITPWNFEEVVDKEASAEKFIERMINNDLYLPNEKVLPKHSLLYEKFTV | |
| | YNELTKVKYVTEGMGKAEFFDAEQKQEIVDLLFKKERKVTKKKLLDFLKKVF | |
| | DEFRIVDISGVEDAFNASLGTYHDLLKIIKDKEFLDDEENEDILEDIVLTLT | |
| | LFEDREMIKQRLSKYADLFDKKVLKKLERRHYTGWGRLSAKLINGIRDKQSG | |
| | KTILDYLIDDGFSNRNFMQLIHDDSLTFKEIIKKAQVSGNSDSLHEVVAELA | |
| | GSPAIKKGILQSLKIVDELVKVMGRYNPENIVVEMARENQTTNKGQRNSRER | |
| | LKRLEEAIKELGSKILKEHPVENTQLQNDRLYLYYLQNGKDMYTGEELDIDR | |
| | LSDYDVDHIIPQSFIKDDSIDNRVLTSSAKARGKSDDVPSEEVVKKMKSFWK | |
| | KLLRSKLISQRKFDNLTKAERGGLTEDDKAGFIKRQLVETRQITKHVAQILD | |
| | SRFNTEFDENNKLIRDVKIITLKSKLVSRFRKEFEFYKVREINDYHHAHDAY | |
| | LNAVVGTALIKKYPKLEPEFVYGDYPKYNSYKMIAKSEKERGKATAKMFFYS | |
| | NIMNFFKTDIKLADGRIRERPVIEVNEETGEIVWDKNKHIATVRKVLSMPQV | |
| | NIVKKTEVQTGGFSKESILPKRKSDKLIARKKKWDTKKYGGFDSPTVAYSVL | |
| | VVADIEKGKKKKLKTVKELVGITIMERSSFEKDPVAFLEDKGYQNIRKDNII | |
| | KLPKYSLFELENGRKRLLASAGELQKGNELALPQKLVTLLYHAKHIEKLTEK | |
| | KEDNEQHREYVEEHKHEFKEILDQISEFSKRYILADKNLEKILELYSKNREA | |
| | PIKELAESFINLFTFTALGAPADFKFFGTTIDRKRYTSTKEILNATLIHQSI | |
| | TGLYETRIDLSKLGGD | |
| CasEnd-203 | MDKPYSIGLDIGTNSVGWAVITDEYKVPSKKFKVLGNTDRHSIKKNLLGALL | 163 |
| | FDSGETAEATRLKRTARRRYTRRKNRIRYLQEIFAEEMNKVDDSFFHRLEES | |
| | FLVEEDKRSERHPIFGNIVDEVAYHEKYPTIYHLRKHLADSTEKADLRLVYL | |
| | ALAHIIKFRGHFLIEGDLNAENTDVQKLFIQFVQVYDNTFEESHLLESTVDA | |
| | EAILTAKISKSRRLENLINQFPNEKKNGLFGNLIALSLGLTPNFKTNFELSE | |
| | DAKLQFSKDTYEEDLENLLAQIGDQYADLFLAAKNLYDAILLSGILTVNTEI | |
| | TKAPLSASMIKRYDEHHQDLILLKAFIRNELPEKYKEIFFDESKNGYAGYID | |
| | GGAKQEEFYKYIKGILSKIEGAEYFLDKIEREDFLRKQRTFDNGSIPHQIHL | |
| | QELHAIIRRQEEFYPFLKENQEKIEKILTFRIPYYVGPLARGNSRFAWASRK | |
| | SDETITPWNFEEVVDKEKSAEAFIERMTNYDKNLPNEKVLPKHSLLYEKFTV | |
| | YNELTKVKYVTEGMRKPAFLDSNQKQEIVDGLFKENRKVTVKKLLNYLFKEF | |
| | EEFRIVEISGVEKAFNASLGTYHDLLKIIKDKEFLDNEENEKILEDIVLTLT | |
| | LFEDREMIKKRLKKYAHLFDKKVLKKLERRRYTGWGRLSAKLINGIRDKQTG | |
| | KTILDYLIDDGFANRNFMQLIHDDSLSFKEEIAKAQVIGETDSLHEVIADLA | |
| | GSPAIKKGILQSVKIVDELVKVMGRHNPENIVIEMARENQTTQKGQRNSRER | |
| | LKRLEESIKKLGSKILKEHPVENTQLQNDKLYLYYLQNGKDMYTGEELDIDH | |
| | LSDYDVDHIIPQSFIKDDSIDNRVLTSSKEARGKSDDVPSIEVVRKMKSFWS | |
| | KLLKAKLISQRKFDNLTKAERGGLTELDKAGFIKRQLVETRQITKHVAQILD | |
| | SRFNTKYDENDKLIRDVKIITLKSKLVSDFRKEFQLYKVREINDYHHAHDAY | |
| | LNAVVGTALIKKYPKLESEFVYGDYKVYNSHKMIAKSEQEIGKATAKYFFYS | |
| | NIMNFFKTDVTLANGEIRKRPLIETNEETGEIVWNKEKHFATVRKVLSMPQV | |
| | NIVKKTEVQTGGFSKESILPKRNSDKLIARKKDWDPKKYGGFDSPTVAYSVL | |
| | VVADIEKGKAKKLKTVKELVGITIMERSSFEKDPVAFLENKGYKNIQKDLII | |
| | KLPKYSLFELENGRKRLLASAGELQKGNELALPQKYVTLLYHAKHYEKLKGS | |
| | PEDNPKHLEYVKQHRDEFDEILDQIEEFAERYILADKNLEKIKELYEENRDA | |
| | DIKELAESFINLLTFTALGAPAAFKFFDKKIDRKRYTSTTEILNATLIHQSI | |
| | TGLYETRIDLSQLGGD | |
| CasEnd-204 | MKKPYSIGLDIGTNSVGWAVITDDYKVPSKKMKVLGNTDRQSIKKNLLGALL | 164 |
| | FDSGETAEATRLKRTARRRYTRRKNRILYLQEIFAEEMAKVDDSFFHRLEDS | |
| | FLVEEDKRGERHPIFGNIVEEVAYHEKFPTIYHLRKHLADSPEKADLRLVYL | |
| | ALAHIIKFRGHFLIEGDLDSENTDVQKLFKQFVEAYNNTFEESHLNEETVDA | |
| | EAILTEKISKSRRLENLIALFPTEKKNGLFGNLIKLSLGLQPNFKTNFGLSE | |
| | DAKLQFSKDTYEEDLENLLGQIGDEYADVFLAAKNLYDAILLSGILTVTDES | |
| | TKAPLSASMIKRYDEHHQDLTLLKAFVREQLPEKYKEIFFDESKNGYAGYID | |
| | GGTSQEEFYKYLKKILEKLDGSEYFLDKIEREDFLRKQRTFDNGSIPHQIHL | |
| | GELHAILRRQEEYYPFLKENQEKIEKILTFRIPYYVGPLARGNSRFAWASRK | |
| | SDETITPWNFEEVVDKEKSAQAFIERMTNNDLYLPEEKVLPKHSLLYEKFTV | |
| | YNELTKVKYVTEGMGEPEFFDANMKQEIVDELFKKNRKVTKKKLLEFLFKEF | |
| | DEFRIVDISGVEKAFNASLGTYHDLLKIIKDKDFLDDEENEDILEDIVLTLT | |
| | LFEDREMIEQRLQKYADLFDKKQLKKLKRRHYTGWGRLSAKLINGIRDKQSG | |
| | KTILDYLKDDGQANRNFMQLIHDDSLSFKEEIAKAQVIGQSDSLHEVVADLA | |
| | GSPAIKKGILQSLKIVDELVKVMGRHNPENIVIEMARENQTTAKGQRNSRER | |
| | LKGLEEAIKNLGSKILKEHPVENSQLQNDRLYLYYLQNGKDMYTGEELDIDR | |
| | LSQYDVDHIIPQSFIKDDSIDNRVLVSSKKARGKSDDVPSEEVVRKMKPYWR | |
| | KLLNAKLISQRKFDNLTKAERGGLTEDDKAGFIKRQLVETRQITKHVAQILD | |
| | SRFNKETDENDKLIRKVKIITLKSKLVSDFRKEFGFYKVREINDYHHAHDAY | |
| | LNAVVGKALIKKYPKLEPEFVYGDYPKYNSYKMIAKSDQEEGKATAKMFFYS | |
| | NLMNFFKTEIKLADGFIIERPQIEVNEETGEIVWDKTKHIATVRKVLSMPQV | |
| | NIVKKTEVQTGGFSKESILPKRNSDKLIARKKKWDTKKYGGFDSPTVAYSVL | |
| | VVADIEKGKAKKLKTVKELVGITIMERSTFEKNPIDFLEDKGYKNIQTDKII | |
| | KLPKYSLFELENGRKRLLASAGELQKGNELALPNKLVTLLYHAKHIEKLKEK | |
| | YEDNEEHKEYVEQHRSQFDEILEQIVEFSKRYILADKNLEKITSLYKENEDY | |
| | SVSELAESFINLLTFTALGAPAAFKFFGTDIDRKRYTSTKEILDATLIHQSI | |
| | TGLYETRIDLSKLGGD | |
| CasEnd-205 | MDKKYSIGLDIGTNSVGWAVITDEYKVPSKKFKVLGNTDRHSIKKNLIGALL | 165 |
| | FDSGETAEATRLKRTARRRYTRRKNRICYLQEIFSNEMAKVDESFFHRLEES | |
| | FLVEEDKRGERHPIFGNIVEEVAYHEKYPTIYHLRKHLADSPEKADLRLIYL | |
| | ALAHIIKFRGHFLIEGDLNTENSDVQKLFHAFVEVYDRLFEESHLNEETVDA | |
| | KAILTEKVSKSRRLENLIKQFPTEKKNGIFGNLIALSLGLQPNFKSNFGLSE | |
| | DAKLQFSKDTYEEDLENLLGQIGDEYADLFSAAKNLYDAILLSGILTVNDNI | |
| | TKAPLSASMIKRYDEHHQDLTLLKAFVRQQLPEKYKEIFFDETKNGYAGYID | |
| | GGASQEEFYKYIKPILKKIDGSEYFLDKIDREDFLRKQRTFDNGSIPHQIHL | |
| | QELHAILRRQAEYYPFLKENAEKIEKILTFRIPYYVGPLARGNSRFAWMTRK | |
| | SNETITPWNFEEVVDKEASAEAFIERMTNFDKNLPEEKVLPKHSLLYETFTV | |
| | YNELTKVKYVTEGMGKPEFFDANQKQEIVDLLFKKYRKVTKKKLLDFLFKEF | |
| | EEFRIVDISGVEDAFNASLGTYHDLLKIIKDKEFLDNEENEDILEDIILTLT | |
| | LFEDREMIEERLSKYADLFDKKVLKKLERRRYTGWGRLSAKLINGIRDKQSG | |
| | KTILDYLIDDGYANRNFMQLIHDDSLSFKEEIKKAQVGGQGDSLHEHIANLA | |
| | GSPAIKKGILQTVKVVDELVKVMGRHKPENIVIEMARENQTTQKGQRNSRER | |
| | LKRLEEAIKELGSQILKEHPVENTQLQNDKLYLYYLQNGRDMYTGEELDIDR | |
| | LSDYDVDHIIPQSFIKDDSIDNKVLTSSAKARGKSDNVPSEEVVKKMKSFWK | |
| | KLLNSKLISQRKFDNLTKAERGGLSELDKAGFIKRQLVETRQITKHVAQILD | |
| | SRMNTKYDENDKLIREVKVITLKSKLVSDFRKDFQFYKVREINNYHHAHDAY | |
| | LNAVVGTALIKKYPKLESEFVYGDYKVYDVRKMIAKSEQEIGKATAKYFFYS | |
| | NIMNFFKTEITLANGEIRKRPLIETNGETGEIVWDKGRDFATVRKVLSMPQV | |
| | NIVKKTEVQTGGFSKESILPKRNSDKLIARKKDWDPKKYGGFDSPTVAYSVL | |
| | VVAKVEKGKKKKLKTVKELVGITIMERSAFEKNPVAFLEDKGYKNIQEDKII | |
| | KLPKYSLFELENGRKRLLASAGELQKGNELALPNKYVTLLYHASHYEKLKGK | |
| | PEDLPKHLEYVEQHRNEFKEILDQISEFAERYVLADKNIEKIKALYEENESF | |
| | SIEEIATSFINLLKFTALGAPAAFKFFGTTIDRKRYTSTKEILNATLIHQSI | |
| | TGLYETRIDLSKLGGD | |
| CasEnd-206 | MDKPYSIGLDIGTNSVGWAVVTDEYKVPSKKFKVLGNTDRKSIKKNLLGALL | 166 |
| | FDSGETAEATRLKRTARRRYTRRKNRILYLQEIFAEEMNKVDESFFHRLEES | |
| | FLVEEDKRGERHPIFGNIVEEVAYHEKYPTIYHLRKHLADSDEKADLRLVYL | |
| | ALAHIIKFRGHFLIEGDLDAENTDVQELFKELLEVYDRTFEESHLEEENVDA | |
| | ESILTEKISKSRRLEKLLALFPNEKKNGLFGEFLKLIVGLTPNFKSNFGLEE | |
| | DAKLQFSKDTYDEDLEELLGQIGDEYAELFVAAKKLYDAILLSGILTVKDNS | |
| | TKAPLSASMVKRYDEHHQDLTLLKKFIRKQLPEKYKEIFFDQSKNGYAGYID | |
| | GGASQEDFYKYLKKLLEKIDGSEYFLDKIEREDFLRKQRTFDNGSIPHQIHL | |
| | QELHAIIRRQGEYYPFLKENQEKIEKILTFRIPYYVGPLARGNSRFAWLSRK | |
| | SDETITPWNFDEIVDKEASAEAFIERMTNFDKNLPDEKVLPKHSLLYEKFTV | |
| | YNELTKVKYVTEGGKKPEFFDANMKQEIFDGVFKKYRKVTKKQLLDYLKKEF | |
| | DEFRIVDISGVEDRFNASLGTYHDLKKILDDKDFLDDEANEKILEDIILTLT | |
| | LFEDREMIKKRLEKYSDLLDKEQLKKLERRRYTGWGRLSAKLINGIRDKETG | |
| | KTILDYLIDDGNSNRNFMQLIHDDNLSFKEEIAKAQVIGDTESLHEVIANLA | |
| | GSPAIKKGILQSLKIVDELVKVMGRHEPENIVVEMARENQTTQKGQKNSRER | |
| | MKRLEESIKELGSDILKEHPVDNTKLQNDKLYLYYLQNGRDMYTGEELDIDK | |
| | LSDYDVDHIVPQSFLKDDSIDNRVLVSSAKARGKSDDVPSEEVVNKMKGFWK | |
| | KLLDAKLITQRKYDNLTKAERGGLTELDKAGFIKRQLVETRQITKHVAQILD | |
| | ERFNTEYDENGKLIRDVKIVTLKSKLVSQFRKEFELYKVREINNYHHAHDAY | |
| | LNAVVGKALIKKYPKLESEFVYGDYPVYDVKKLIKKSDKEIGKATAKMFFYS | |
| | NIMNFFKTDVKLADGTVVERPDIEVNDETGEIAWDKEKHIATVKKVLSMPQV | |
| | NIVKKTEVQTGGFSKESILPKRDSDKLIARKKDWDTKKYGGFDSPTVAYSVL | |
| | VIADIEKGKAKKLKTVKELVGITIMERSAFEKNPVAFLEDKGYQNIKKENII | |
| | KLPKYSLFELENGRKRLLASAGELQKGNELALPQHYVTLLYHAKHYEKLKGK | |
| | PEDIEYHLIYVEEHRDEFDELLDQISEFSKRYILADANLEKIKKLYEKNKEA | |
| | SIEELAKSFINLLTFTALGAPAAFKFFGKNIDRKRYTSTKEILNATLIHQSI | |
| | TGLYETRIDLSKLGED | |
| CasEnd-207 | MDKKYSIGLDIGTNSVGWAVITDEYKVPSKKFKVLGNTDRHSIKKNLIGALL | 167 |
| | FDSGETAEATRLKRTARRRYTRRKNRICYLQEIFSNEMAKVDPSFFKRLEES | |
| | FLVEEDKSGSRHPIFGNIVEEVAYHEKYPTIYHLRKKLVDSDEKADLRLIYL | |
| | ALAHMIKFRGHFLIEGDLNPDNSDVDKLFIQLVQTYNQLFEENPINASGVDA | |
| | KAILSARLSKSRRLENLIAQLPGEKKNGLFGNLIALSLGLTPNFKSNEDLAE | |
| | DAKLQLSKDTYDDDLDNLLAQIGDQYADLFLAAKNLSDAILLSDILRVDTTE | |
| | TKAPLSASMIKRYDDHHQDLTLLKELVRKELPEKYKTIFFDQNANGYAGYID | |
| | GGATQEEFYAAIKPILESMSGTKELLEKLENRDLLRKQRTFDNGSIPHQIHL | |
| | GELRAILERQEKFYPFLKENREKIEKILSFRIPYYVGPLARGNSRFAWMTRK | |
| | SEETITPWNFEEVVDKGASAQSFIERMTNFDKNLPNEKVLPKHSLLYEYFTV | |
| | YNELTKVKYVTEGMRKPAFLSGEQKKAIVDLLFKTNRKVTVKQLKEDYFKKI | |
| | ECFDSVEISGVEDRFNASLGTYHDLLKIIKDKDFLDNEENEDILEDIVLTLT | |
| | LFEDREMIEERLKTYAHLFDDKVMKQLKRRRYTGWGRLSRKLINGIRDKQSG | |
| | KTILDFLKSDGFANRNFMQLIHDDSLTFKEDIQKAQVSGQGDSLHEHIANLA | |
| | GSPAIKKGILQTVKVVDELVKVMGRHKPENIVIEMARENQTTQKGQKNSRER | |
| | MKRIEEGIKELGSQILKEHPVENTQLQNEKLYLYYLQNGRDMYVDQELDINR | |
| | LSDYDVDHIVPQSFLKDDSIDNKVLTRSDKARGKSDNVPSEEVVKKMKNYWR | |
| | QLLNAKLITQRKFDNLTKAERGGLSELDKAGFIKRQLVETRQITKHVAQILD | |
| | SRMNTKYDENDKLIREVKVITLKSKLVSDFRKDFQFYKVREINNYHHAHDAY | |
| | LNAVVGTALIKKYPKLESEFVYGDYKVYDVRKMIAKSEQEIGKATAKYFFYS | |
| | NIMNFFKTEITLANGEIRKRPLIETNGETGEIVWDKGRDFATVRKVLSMPQV | |
| | NIVKKTEVQTGGFSKESILPKRDSDKLIARKKDWDPKKYGGFDSPTVAYSVL | |
| | VVAKKPVGKKKKLVKVKELLGITIMERSEFEKDPLGFLEKKGYTDVKMDEII | |
| | KLPKYSLFELGNGRKRMLASAGELQKGNELALPSEYVNFLYLASNYEKLKGT | |
| | PEEQKKKQKYVEENKSYLDEIIKQISEFSERVIKADANLQKVKAAYEKHKDK | |
| | PIQEQAENIIHLFTLTALGAPAAFKYFDETIDRKRYTSTKEVLDATLIHQSI | |
| | TGLYETRIDLSFLGGD | |
| CasEnd-208 | MDKKYSIGLDIGTNSVGWAVITDEYKVPSKKFKVLGNTDRHSIKKNLIGALL | 168 |
| | FDSGETAEATRLKRTARRRYTRRKNRICYLQEIFSNEMAKVDDSFFHRLEES | |
| | FLVEEDKRNERHPIFGNIVDEVAYHEKYPTIYHLRKHLADSTEKADLRLVYL | |
| | ALAHIIKFRGHFLIEGDLNSENSDVQKLFKQFVQTYNQTFEENPLNEETVDA | |
| | ESILTEKLSKSRRLENLIAQFPNEKKNGLFGNLIALSLGLTPNFKSNFDLSE | |
| | DAKLQFSKDTYDEDLENLLGQIGDEYADLFLAAKNLYDAILLSGILTVNDES | |
| | TKAPLSASMIKRYDEHHQDLTLLKAFVREQLPEKYKEIFFDKSKNGYAGYID | |
| | GGASQEEFYKYIKPILEKLDGSEYFLEKIEREDFLRKQRTFDNGSIPHQIHL | |
| | GELHAILRRQEEYYPFLKENQEKIEKILTFRIPYYVGPLARGNSRFAWATRK | |
| | SDETITPWNFEEVIDKEASAQAFIERMTNNDKNLPDEKVLPKHSLLYEKFTV | |
| | YNELTKVKYVTEGMGKPEFFSANQKEEIVDLLFKKERKVTKKKLLEFLFKEF | |
| | EEFRIVDISGVEDAFNASLGTYHDLLKIIKDKDELDNEENEDILEDIVLTLT | |
| | LFEDREMIEKRLEKYADLFDKKVLKKLKRRRYTGWGRLSRKLINGIRDKQSG | |
| | KTILDYLIDDGFANRNFMQLIHDDSLSFKEEIKKAQVIGDTDSLHEHIANLA | |
| | GSPAIKKGILQTVKVVDELVKVMGRHKPENIVIEMARENQTTQKGQRNSRER | |
| | LKRLEEGIKELGSDILKEHPVENTQLQNDKLYLYYLQNGKDMYTGEELDIDR | |
| | LSDYDVDHIIPQSFIKDDSIDNRVLTSSAKARGKSDNVPSEEVVKKMKSFWY | |
| | KLLKAKLISQRKFDNLTKAERGGLSELDKAGFIKRQLVETRQITKHVAQILD | |
| | SRMNTKYDENDKLIREVKVITLKSKLVSDFRKDFQFYKVREINNYHHAHDAY | |
| | LNAVVGTALIKKYPKLESEFVYGDYKVYDVRKMIAKSEQEIGKATAKYFFYS | |
| | NIMNFFKTEITLANGEIRKRPLIETNGETGEIVWDKGRDFATVRKVLSMPQV | |
| | NIVKKTEVQTGGFSKESILPKRDSDKLIARKKDWDTKKYGGFDSPTVAYSVL | |
| | VVAKIEKGKAKKLKTVKELVGITIMERSSFEKNPVAFLEAKGYQNIQKDKII | |
| | KLPKYSLFELENGRKRLLASAGELQKGNELALPQKYVTLLYHAKHYEKLKGK | |
| | PEDEEQHLEYVEQHRDEFDEILEQISEFSERYILADKNLEKIEELYEKNENF | |
| | SIEELAESFINLLTLTALGAPAAFKFLGTTIDRKRYTSTTEILNSTLIHQSI | |
| | TGLYETRIDLSKLGGD | |
| CasEnd-209 | MDKKYSIGLDIGTNSVGWAVITDEYKVPSKKFKVLGNTDRHSIKKNLIGALL | 169 |
| | FDSGETAEATRLKRTARRRYTRRKNRICYLQEIFSNEMAKVDDSFFHRLEES | |
| | FLVPEDKRNERHPIFGNIVDEVAYHEKYPTIYHLRKKLADSDEKADLRLIYL | |
| | ALAHMIKFRGHFLIEGDLNSDNSDVQKLFKQLVQTYNQLFEESPLNEEGVDA | |
| | KAILSARLSKSRRLENLIAQFPGEKKNGLFGNLIALSLGLTPNFKSNEDLAE | |
| | DAKLQLSKDTYDEDLENLLGQIGDQYADLFLAAKNLYDAILLSGILTVNDES | |
| | TKAPLSASMVKRYDEHHKDLKLLKKLVRQQLPEKYKEIFSDKSKNGYAGYID | |
| | GKTSQEEFYKYIKPILEKVDGSEEFLEKINREDFLRKQRTFDNGSIPHQIHL | |
| | QELHAILRRQEKYYPFLKENREKIEKILTFRIPYYVGPLARGNSRFAWMSRK | |
| | SDEKITPWNFDEVVDKEASAQAFIERMTNNDLYLPDEKVLPKHSLLYEKFTV | |
| | YNELTKVKYVTEGMRKPQFLSAEQKQEIVDLLFKKNRKVTVKKLKEDYFKKF | |
| | ECFDSVEISGVEDRFNASLGTYHDLLKIIKDKDFLDNEENEKILEDIVLTLT | |
| | LFEDREMIEERLKKYADLFDDKVLKQLKRRHYTGWGRLSAKLINGIRDKQSG | |
| | KTILDYLISDGFANRNFMQLIHDDSLTFKEEIEKAQVSGQGDSLHEHIANLA | |
| | GSPAIKKGILQTVKVVDELVKVMGRHKPENIVIEMARENQTTQKGQRNSRQR | |
| | LKRLEEGIKELGSDILKEYPVENTQLQNDRLYLYYLQNGKDMYTGEELDIDR | |
| | LSQYDIDHIIPQSFIKDDSIDNKVLVSSAKARGKSDNVPSEEVVKKMKNYWR | |
| | QLLDAKLISQRKFDNLTKAERGGLSELDKAGFIKRQLVETRQITKHVAQILD | |
| | SRMNTKYDENDKLIREVKVITLKSKLVSDFRKDFQFYKVREINNYHHAHDAY | |
| | LNAVVGTALIKKYPKLESEFVYGDYKVYDVRKMIAKSEQEIGKATAKYFFYS | |
| | NIMNFFKTEITLANGEIRKRPLIETNGETGEIVWDKGRDFATVRKVLSMPQV | |
| | NIVKKTEVQTGGFSKESILPKRNSDKLIARKKDWDPKKYGGFDSPTVAYSVL | |
| | VVAKVEKGKSKKLKSVKELLGITIMERSSFEKNPIDFLEAKGYKEVKKDLII | |
| | KLPKYSLFELENGRKRMLASAGELQKGNELALPSKYVNFLYLASHYEKLKGS | |
| | PEDNEQKQLFVEQHKHYLDEIIEQISEFSKRVILADANLDKVLSAYNKHRDK | |
| | PIREQAENIIHLFTLTNLGAPAAFKYFDTTIDRKRYTSTKEVLDATLIHQSI | |
| | TGLYETRIDLSQLGGD | |
| CasEnd-210 | MDKSYSIGLDIGTNSVGWAVITDEYKVPSKKFKVLGNTGRKSIKKNLLGALL | 170 |
| | FDSGETAEATRLKRTARRRYTRRKNRICYLQEIFSNEMAKVDDSFFHRLEES | |
| | FLVEEDKKHERHPIFGNIVDEVAYHEKYPTIYHLRKKLVDSTDKADLRLIYL | |
| | ALAHMIKFRGHFLIEGDLNPDNSDVDKLFIQLVQTYNQLFEENPINASGVDA | |
| | KAILSARLSKSRRLENLIAQLPGEKKNGLFGNLIALSLGLTPNFKSNFDLAE | |
| | DAKLQLSKDTYDDDLDNLLAQIGDQYADLFLAAKNLSDAILLSDILRVNTEI | |
| | TKAPLSASMIKRYDEHHQDLTLLKALVRQQLPEKYKEIFFDQSKNGYAGYID | |
| | GGASQEEFYKFIKPILEKMDGTEELLVKLNREDLLRKQRTFDNGSIPHQIHL | |
| | GELHAILRRQEDFYPFLKDNREKIEKILTFRIPYYVGPLARGNSRFAWMTRK | |
| | SEETITPWNFEEVVDKGASAQSFIERMTNFDKNLPNEKVLPKHSLLYEYFTV | |
| | YNELTKVKYVTEGMRKPAFLSGEQKKAIVDLLFKTNRKVTVKQLKEDYFKKI | |
| | ECFDSVEISGVEDRFNASLGTYHDLLKIIKDKDFLDNEENEDILEDIVLTLT | |
| | LFEDREMIEERLKTYAHLEDDKVMKQLKRRRYTGWGRLSRKLINGIRDKQSG | |
| | KTILDFLKSDGFANRNFMQLIHDDSLTFKEDIQKAQVSGQGESLHEQIANLA | |
| | GSPAIKKGILQTIKIVDEIVKVMGRYAPENIVIEMARENQTTQKGQKNSRER | |
| | MKRIEEGIKELGSQILKEHPVENTQLQNEKLYLYYLQNGRDMYVDQELDINR | |
| | LSDYDVDHIVPQSFLKDDSIDNKVLTRSDKARGKSDNVPSEEVVKKMKNYWR | |
| | QLLNAKLITQRKFDNLTKAERGGLTELDKAGFIKRQLVETRQITKHVAQILD | |
| | ERFNTEYDDNGKLIRDTKIVTLKSKLVSQLRKDFGLYKIREVNNYHHAHDAY | |
| | LNAVVGKALIKKYPKLESEFVYGDYPVYDVAKLVKKSDKEIGKATAKMFFYS | |
| | NLMNFFKSDVSLADGTLKKRPLIEVNEETGEIIWDKEKHIETIKKVLSMPQV | |
| | NIVKKTEVQTGGFSKESILPKRNSDKLIARKKDWDPKKYGGFDSPTVAYSVL | |
| | VVAKVEKGKSKKLKSVKELLGITIMERSSFEKNPIDFLEAKGYKEVKKDLII | |
| | KLPKYSLFELENGRKRMLASAGELQKGNELALPSKYVNFLYLASHYEKLKGS | |
| | PEDNEQKQLFVEQHKHYLDEIIEQISEFSKRVILADANLDKVLSAYNKHRDK | |
| | PIREQAENIIHLFTLTNLGAPAAFKYFDTTIDRKRYTSTKEVLDATLIHQSI | |
| | TGLYETRIDLSQLGGD | |
| CasEnd-211 | MDKKYSIGLDIGTNSVGWAVITDEYKVPSKKFKVLGNTDRHSIKKNLIGALL | 171 |
| | FDSGETAEATRLKRTARRRYTRRKNRICYLQEIFSNEMAKVDDSFFHRLEES | |
| | FLVEEDKRGERHPIFGNIVEEVAYHEKYPTIYHLRKHLADSTEKADLRLIYL | |
| | ALAHIIKFRGHFLIEGDLNSENTDVQKLFIQFVQTYNQTFEENPLSEETVDA | |
| | KSILTAKLSKSRKLENLIAQFPNEKKNGLFGNLIALSLGLTPNFKSNFELSE | |
| | DAKLQFSKDTYDEDLENLLGQIGDEYADLFVAAKNLYDAILLSGILTVNDES | |
| | TKAPLSASMIKRYDEHHQDLTLLKKFVRQQLPEKYKEIFFDESKNGYAGYID | |
| | GGASQEEFYKYIKPILSKVDGAEYFLEKIEREDFLRKQRTFDNGSIPHQIHL | |
| | QELHAILRRQEEFYPFLKENQEKIEKILTFRIPYYVGPLARGNSRFAWMTRK | |
| | SDETITPWNFEEVVDKEASAEAFIERMTNFDKNLPDEKVLPKHSLLYEKFTV | |
| | YNELTKVKYVTEGMGKPEFFSANQKQEIFDELFKKNRKVTKKKLLEFLFKEF | |
| | ECFRIVEISGVEDAFNASLGTYHDLLKIIKDKDFLDNEENEDILEDIVLTLT | |
| | LFEDREMIEKRLSKYADLFDKKVLKKLKRRRYTGWGRLSKKLINGIRDKQSG | |
| | KTILDYLIDDGFANRNFMQLIHDDSLTFKEEIKKAQVIGQGDSLHEHIANLA | |
| | GSPAIKKGILQTVKVVDELVKVMGRHKPENIVIEMARENQTTQKGQRNSRER | |
| | LKRLEEAIKELGSDILKEHPVENTQLQNDKLYLYYLQNGKDMYTGEELDIDR | |
| | LSDYDVDHIIPQSFIKDDSIDNRVLTSSAKARGKSDNVPSEEVVKKMKSFWE | |
| | QLLKAKLISQRKFDNLTKAERGGLSELDKAGFIKRQLVETRQITKHVAQILD | |
| | SRMNTKYDENDKLIREVKVITLKSKLVSDFRKDFQFYKVREINNYHHAHDAY | |
| | LNAVVGTALIKKYPKLESEFVYGDYKVYDVRKMIAKSEQEIGKATAKYFFYS | |
| | NIMNFFKTEITLANGEIRKRPLIETNGETGEIVWDKGRDFATVRKVLSMPQV | |
| | NIVKKTEVQTGGFSKESILPKRDSDKLIARKKDWDTKKYGGFDSPTVAYSVL | |
| | VVADVEKGKSKKLKTVKELVGITIMERSAFEKNPVAFLEDKGYQNIQKDLII | |
| | KLPKYSLFELENGRKRLLASAGELQKGNELALPNKYVTLLYHAKHYEKLKGK | |
| | PEDEEKHREYVEKHRDEFDEILDQISEFSKRYILADKNLEKILELYSKNENY | |
| | SIEELASSFINLLTFTALGAPAAFKFFGSTIDRKRYTSTKEILNATLIHQSI | |
| | TGLYETRIDLSKLGGD | |
| CasEnd-212 | MDKSYSIGLDIGTNSVGWAVITDEYKVPSKKFKVLGNTDRHSIKKNLLGALL | 172 |
| | FDSGETAEATRLKRTARRRYTRRKNRILYLQEIFAEEMSKVDDSFFHRLEES | |
| | FLVEEDKRGERHPIFGNIVDEVAYHENYPTIYHLRKKLADSTEKADLRLIYL | |
| | ALAHIIKFRGHFLIEGDLNSENTDVQKLFKQLVQTYDQLFEESHLSEETVDA | |
| | SDILTAKLSKSRRLENLIAQFPNEKKNGLFGNLIALSLGLTPNFKSNFKLSE | |
| | DAKLQFSKDTYDEDLENLLAQIGDQYADLFLAAKNLSDAILLSGILTVNTEI | |
| | TKAPLSASMIKRYDEHHQDLTLLKKLVRKQLPEKYKEIFFDDSKNGYAGYID | |
| | GGASQEEFYKYIKPILSKLDGSEYFLDKIEREDFLRKQRTFDNGSIPHQIHL | |
| | QELHAILRRQEKFYPFLKENQEKIEKILTFRIPYYVGPLARGNSRFAWMSRK | |
| | SDETITPWNFDEVVDKEASAQAFIERMTNNDKNLPNEKVLPKHSLLYEKFTV | |
| | YNELTKVKYITEGMRKPAFFSAEQKQEIVDLLFKKNRKVTVKKLKEYLFKKI | |
| | ECFDSVEISGVEDAFNASLGTYHDLLKIIKDKDFLDNEENEKILEDIVLTLT | |
| | LFEDREMIEQRLSKYADLFDKKVLKKLKRRRYTGWGRLSAKLINGIRDKQSG | |
| | KTILDYLIDDGFANRNFMQLIHDDSLTFKEEIEKAQVIGKGDSLHEVIANLA | |
| | GSPAIKKGILQSLKIVDELVKVMGRHNPENIVIEMARENQTTQKGQKNSRER | |
| | LKRLEESIKELGSKILKEHPVDNTQLQNDKLYLYYLQNGKDMYTGEELDIDR | |
| | LSDYDVDHIIPQSFIKDDSIDNRVLTSSEKARGKSDNVPSIEVVKKMKSFWR | |
| | KLLNAKLISQRKFDNLTKAERGGLSELDKAGFIKRQLVETRQITKHVAQILD | |
| | SRFNTKYDENDKLIRKVKIITLKSKLVSDFRKEFGFYKVREINDYHHAHDAY | |
| | LNAVVGTALIKKYPKLESEFVYGDYPVYDSYKMIAKSEQEIGKATAKYFFYS | |
| | NIMNFFKSEITLANGEIRKRPLIETNEETGEIVWDKEKDFATVKKVLSMPQV | |
| | NIVKKTEVQTGGFSKESILPKRNSDKLIARKKDWDTKKYGGFDSPTVAYSVL | |
| | VVADVEKGKSKKLKTVKELVGITIMERSSFEKNPIAFLEAKGYKNIQKELII | |
| | KLPKYSLFELENGRKRLLASAGELQKGNELALPGKYVTLLYHAKHYEKLKGS | |
| | PEDNEEHREYVEQHREEFKEIFDQISEFSERYILADKNLEKILELYAENEDS | |
| | SIEELASSFINLLTFTALGAPAAFKFFDQDIDRKRYTSTTEILNATLIHQSI | |
| | TGLYETRIDLSQLGGD | |
| CasEnd-213 | MDKKYSIGLDIGTNSVGWAVITDEYKVPSKKFKVLGNTDRHSIKKNLLGALL | 173 |
| | FDSGETAEATRLKRTARRRYTRRKNRIRYLQEIFAEEMAKVDDSFFHRLEES | |
| | FLVEEDKRHERHPIFGNIVDEVAYHEKYPTIYHLRKKLADSTDKADLRLIYL | |
| | ALAHMIKFRGHFLIEGDLNPDNSDVQKLFYQLVQTYNQLFEESPIDISGVDA | |
| | KAILSAKLSKSRRLENLIAQFPGEKKNGLFGNLIALSLGLTPNFKSNEDLAE | |
| | DAKLQLSKDTYDEDLDNLLAQIGDQYADLFLAAKNLSDAILLSDILTVNSEV | |
| | TKAPLSASMIKRYDEHHQDLTLLKELVRQQLPEKYKEIFFDQTKNGYAGYID | |
| | GGASQEEFYKYIKPILEKMDGTEDLLSKLNREDFLRKQRTFDNGSIPHQIHL | |
| | NELHAILRRQEDFYPFLKENQEKIEKILTFRIPYYVGPLARGNSRFAWLTRK | |
| | SEETITPWNFEEVVDKGASAQSFIERMTNFDKNLPHEKVLPKHSLLYEYFTV | |
| | YNELTKVKYVTEGMRKPEFLSAGQKEAIVDLLFKTNRKVTVKQLKEDYFKKI | |
| | ECFDTVEISGVEDKFNASLGTYHDLLKIIKDKDFLDNEENEDILEDIVLTLT | |
| | LFEDREMIEERLEKYAHLFDKKVLKQLKRRRYTGWGRLSRKLINGIRDKQSG | |
| | KTILDFLKSDGFANRNFMQLIHDDSLTFKEAIKKAQVIGQGDSLHEQIANLA | |
| | GSPAIKKGILQSVKIVDELVKVMGRHKPENIVIEMARENQTTQKGQKNSRER | |
| | MKRIEEGIKELGSQILKEHPVENTQLQNEKLYLYYLQNGRDMYVDQELDINR | |
| | LSDYDVDHIVPQSFLKDDSIDNKVLTRSDKARGKSDNVPSEEVVKKMKNYWR | |
| | QLLNAKLITQRKFDNLTKAERGGLSELDKAGFIKRQLVETRQITKHVAQILD | |
| | SRMNTKYDENDKLIREVKVITLKSKLVSDFRKDFQFYKVREINDYHHAHDAY | |
| | LNAVVGTALIKKYPKLESEFVYGDYKVYDVRKMIAKSEQEIGKATAKYFFYS | |
| | NIMNFFKSEVTLANGEIRKRPLIEMNEETGEIVWDKGKDFATVRKVLSMPQV | |
| | NIVKKTEVQTGGFSKESILPKRNSDKLIARKKDWDPKKYGGFDSPTVAYSVL | |
| | VVAKVEKGKSKKLKSVKELVGITIMERSSFEKNPVDFLEAKGYKNIQKDLII | |
| | KLPKYSLFELENGRKRLLASAGELQKGNELALPQKYVTFLYHAKNYEKIKGS | |
| | EEDREKKLEYVEQHRHEFDEILSQIEEFSKRYILADKNLSKIKELYNNEADK | |
| | SISELAENFIHLFTFTSLGAPAAFKFFDTTIDRKRYTSTTEVLDATLIHQSI | |
| | TGLYETRIDLSQLGGD | |
| CasEnd-214 | MKKPYSIGLDIGTNSVGWAVVTDDYKVPAKKMKVLGNTDKSHIKKNLLGALL | 174 |
| | FDSGNTAEDRRLKRTARRRYTRRRNRILYLQEIFAEEMNKVDDSFFHRLDDS | |
| | FLVTEDKRGERHPIFGNLAEEVKYHENFPTIYHLRKHLADSPEKADLRLVYL | |
| | ALAHIIKYRGHFLIEGKLDTENKDVQELFQEFLAVYDNTFEDSSLQDQNVQI | |
| | EEILTDKISKSAKKDRVLKLFPNEKSNGFFAEFLKLIVGNQADFKKNFELEE | |
| | KAPLQFSKDSYEEDLEVLLGQIGDNYADLFVAAKKLYDSILLSGILTVNDVS | |
| | TKAPLSASMIQRYEEHQEDLAQLKCFIRKKLSEKYNEVFSDKSKDGYAGYID | |
| | GKTNQEAFYKYLKKLLNKVEGSGYFLEKIEREDFLRKQRTFDNGSIPHQIHL | |
| | QEMRAIIRRQAEYYPFLAENQDKIEQILTFRIPYYVGPLARGKSDFAWLSRK | |
| | SDEKITPWNFDEIVDKESSAEAFINRMTNYDLYLPEQKVLPKHSLLYEKFTV | |
| | YNELTKVRYKTEQMGKTHFFDANMKQEIFDGVFKKYRKVTKKKLMDFLHKEF | |
| | DEFRIVDLTGLDKQFNASYGTYHDLLKILQDKDFLDDPKNEKILEDIVLTLT | |
| | LFEDREMIRKRLSKYSDLLTKEQVKKLERRHYTGWGRLSAKLINGIRNKETR | |
| | KTILDYLIDDGNSNRNFMQLINDDALSFKEEIAKAQVIGETDNLNQVVQDLA | |
| | GSPAIKKGILQSLKIVDELVKIMGRYNPENIVVEMARENQFTNQGRRNSQQR | |
| | LKGLTDSIKELGSQILKEHPVDNSQLQNDRLFLYYLQNGRDMYTGEELDIDK | |
| | LSQYDIDHIIPQAFIKDDSIDNRVLVSSAKARGKSDDVPSKEVVKKMKSFWQ | |
| | KLLDAKLISQRKFDNLTKAERGGLTDDDKAGFIKRQLVETRQITKHVARILD | |
| | ERFNTETDENNKKIRKVKIVILKSNLVSNFRKEFELYKVREINDYHHAHDAY | |
| | LNAVVAKALLGKYPKLEPEFVYGEYPKYNSYRYVDETNKERKKATAKMFFYS | |
| | NIMNFFKSDVKLADGSVVERPMIEVNNETGEIVWDKTKHISTVKKVLSYPQV | |
| | NIVKKVEEQTGGFSKENILPKGNSDKLIPRKTKWDTKKYGGFDSPIVAYSVL | |
| | VIADIEKGKAKKLKTVKELIGITIMEKMTFEKDPVAFLERKGYQNIQEENII | |
| | KLPKYSLFELENGRRRLLASARELQKGNEIVLPNHLVTLLYHAKNIDKVSEK | |
| | AKDVPKHLQYVEKHRSEFKELLDEIMNFSKKYTLAEANLEKIIELYADNNQA | |
| | SIEEIASSFINLLTFTALGAPAAFKFLDKNIDRKRYTSTTEILNATLIHQSI | |
| | TGLYETRIDLSKLGED | |
| CasEnd-215 | MDKKYSIGLDIGTNSVGWAVITDEYKVPSKKFKVLGNTDRHSIKKNLIGALL | 175 |
| | FDSGETAEATRLKRTARRRYTRRKNRICYLQEIFSNEMAKVDPSFFQRLEES | |
| | FLVEEDKRGERHPIFGNIVEEVAYHEKYPTIYHLRKELADSDEKADLRLVYL | |
| | ALAHMIKFRGHFLIEGDLDAENSDVQKLFLTLIETYDQTFEESPLEEEEIDA | |
| | EAILTEKLSKSRRLENLIAKFPGEKKNSLFGNLIGLALGLTPNFKSNFDLSE | |
| | DAKLQFSKDTYDEDLEELLGQIGDEYADLFLAAKNLYDAILLSGILTVDDNS | |
| | TKAPLSASMVKRYDEHHQDLTLLKEFVRKQLPEKYKEIFFDQTKNGYAGYID | |
| | GGASQEEFYKYLKKLLEKIDGSEYFLDKIEREDFLRKQRTFDNGSIPHQIHL | |
| | QELHAILRRQEEYYPFLKENQEKIEKILTFRIPYYVGPLARGNSRFAWMSRK | |
| | SDETITPWNFDDVVDKEKSAEKFIERMTNFDKNLPEEKVLPKHSLLYEKFTV | |
| | YNELTKVKYVTEGGKKPKFFDAELKQEIFDDLFKKERKVTKKQLLEYLYKEF | |
| | DEFRIVEISGVEDRFNASLGTYHDLLKIIKDKSFLDNSENEEILEDIILTLT | |
| | LFEDREMIKKRLEKYSDLFDKKQLKKLSRRRYTGWGRLSAKLINGIRDKQTG | |
| | KTILDYLIDDGFTNRNFMQLIHDDNLTFKEEISKAQVIKDTDSLHEHIANLA | |
| | GSPAIKKGILQTVKVVDELVKVMGRHKPENIVIEMARENQTTQKGQKNSRER | |
| | MKRIEEGIKELGSQILKEHPVENTQLQNEKLYLYYLQNGRDMYVDQELDINR | |
| | LSDYDVDHIVPQSFLKDDSIDNKVLTRSDKARGKSDNVPSEEVVKKMKNYWR | |
| | QLLNAKLITQRKFDNLTKAERGGLSELDKAGFIKRQLVETRQITKHVAQILD | |
| | SRMNTKYDENDKLIREVKVITLKSKLVSDFRKDFQFYKVREINNYHHAHDAY | |
| | LNAVVGTALIKKYPKLESEFVYGDYKVYDVRKMIAKSEQEIGKATAKYFFYS | |
| | NIMNFFKTEITLANGEIRKRPLIETNGETGEIVWDKGRDFATVRKVLSMPQV | |
| | NIVKKTEVQTGGFSKESILPKRNSDKLIARKKDWDPKKYGGFDSPTVAYSVL | |
| | VVAKVEKGKSKKLKSVKELLGITIMERSSFEKNPIDFLEAKGYKEVKKDLII | |
| | KLPKYSLFELENGRKRMLASAGELQKGNELALPSKYVNFLYLASHYEKLKGS | |
| | PEDNEQKQLFVEQHKHYLDEIIEQISEFSKRVILADANLDKVLSAYNKHRDK | |
| | PIREQAENIIHLFTLTNLGAPAAFKYFDTTIDRKRYTSTKEVLDATLIHQSI | |
| | TGLYETRIDLSQLGGD | |
| CasEnd-216 | MDKKYSIGLDIGTNSVGWAVITDEYKVPSKKFKVLGNTDRHSIKKNLIGALL | 176 |
| | FDSGETAEATRLKRTARRRYTRRKNRICYLQEIFSNEMAKVDDSFFHRLEES | |
| | FLVEEDKRHERHPIFGNIVDEVAYHEKYPTIYHLRKELADSTEKADLRLVYL | |
| | ALAHIIKFRGHFLIEGDLNPENTDVQKLFIQFVQTYNRTFEESPLSEETVDA | |
| | KSILTEKLSKSRRLENLIAQFPNEKKNGLFGNLIALSLGLTPNFKSNFELSE | |
| | DAKLQFSKDTYDEDLENLLGQIGDEYADLFLAAKNLYDAILLSGILTVNDES | |
| | TKAPLSASMIKRYDEHHQDLTLLKAFVREQLPEKYKEIFFDKSKNGYAGYID | |
| | GGASQEEFYKYIKKILEKIDGSEYFLAKIEREDFLRKQRTFDNGSIPHQIHL | |
| | GELHAILRRQGEYYPFLKENQEKIEKILTFRIPYYVGPLARGNSRFAWMSRK | |
| | SDETITPWNFEEVVDKEASAEAFIERMTNFDKNLPEEKVLPKHSLLYEKFTV | |
| | YNELTKVKYVTEGMGKAEFFDANMKQEIFDGLFKKNRKVTKKKLLDFLDKEF | |
| | DEFRIVDISGVEKAFNASLGTYHDLLKIIKDKDFLDNEENEDILEDIILTLT | |
| | LFEDREMIEERLSKYADLFDKKVLKKLERRRYTGWGRLSAKLINGIRDKQSG | |
| | KTILDYLIDDGNANRNFMQLIHDDSLTFKEEIKKAQVIGESDSLHEHIANLA | |
| | GSPAIKKGILQTVKVVDELVKVMGRHKPENIVIEMARENQTTQKGQKNSRER | |
| | MKRIEEGIKELGSQILKEHPVENTQLQNEKLYLYYLQNGRDMYVDQELDINR | |
| | LSDYDVDHIVPQSFLKDDSIDNKVLTRSDKARGKSDNVPSEEVVKKMKNYWR | |
| | QLLNAKLITQRKFDNLTKAERGGLSELDKAGFIKRQLVETRQITKHVAQILD | |
| | SRMNTKYDENDKLIREVKVITLKSKLVSDFRKDFQFYKVREINNYHHAHDAY | |
| | LNAVVGTALIKKYPKLESEFVYGDYKVYDVRKMIAKSEQEIGKATAKYFFYS | |
| | NIMNFFKTEITLANGEIRKRPLIETNGETGEIVWDKGRDFATVRKVLSMPQV | |
| | NIVKKTEVQTGGFSKESILPKRDSDKLIARKKDWDTKKYGGFDSPTVAYSVL | |
| | VVADIEKGKAKKLKTVKELVGITIMERSAFEKDPVAFLEDKGYQNVQEDKII | |
| | KLPKYSLFELENGRKRLLASAGELQKGNELALPNKYVTLLYHAKHYEKLKEK | |
| | PEDEEKHLEYVDKHRDEFDEILDQISEFSERYILADKNLEKIKELYAKFESY | |
| | SIEELASSFINLLTFTALGAPAAFKFLGSTIDRKRYTSTKEILNATLIHQSI | |
| | TGLYETRIDLSKLGGD | |
| CasEnd-217 | MKKKYSIGLDIGTNSVGWAVITDEYKVPSKKFKVLGNTDRQSIKKNLLGALL | 177 |
| | FDSGETAEATRLKRTARRRYTRRKNRIRYLQEIFAEEMSKVDDSFFHRLEES | |
| | FLVEEDKKHERHPIFGNIVDEVAYHEKYPTIYHLRKKLADSTEKADLRLIYL | |
| | ALAHIIKFRGHFLIEGDLNSENTDVQKLFIQLVQTYNQLFEENPINEEGIDA | |
| | KAILTAKLSKSRRLENLIAQLPGEKRNGLFGNLIALSLGLTPNFKSNEDLAE | |
| | DAKLQLSKDTYDEDLDNLLAQIGDQYADLFLAAKNLSDAILLSDILTVNDEI | |
| | TKAPLSASMIKRYDEHHQDLTLLKALVRQQLPEKYKEIFFDQSKNGYAGYID | |
| | GGASQEEFYKYIKPILEKMDGTEELLAKLNREDFLRKQRTFDNGSIPHQIHL | |
| | GELHAILRRQEDFYPFLKENQEKIEKILTFRIPYYVGPLARGNSRFAWMSRK | |
| | SEETITPWNFEEVVDKEASAQAFIERMTNFDKNLPSEKVLPKHSLLYEKFTV | |
| | YNELTKVKYVTEGMRKPHFLSSEQKEEIVDLLFKKNRKVTVKQLKEDYFSKI | |
| | ECFDSVEISGVEDKFNASLGTYHDLLKIIKDKDFLDNEENEDILEDIVLTLT | |
| | LFEDKEMIEERLAKYAHLFDKKVMKKLKRRRYTGWGRLSRKLINGIKDKQSG | |
| | KTILDFLKSDGFANRNFMQLIHDDSLTFKEEIEKAQVKGQGESLHEQIANLA | |
| | GSPAIKKGILQSVKIVDELVKVMGRHAPENIVIEMARENQTTQKGQKNSRER | |
| | MKRIEEGIKELGSQILKEHPVENTQLQNEKLYLYYLQNGRDMYVDQELDINR | |
| | LSDYDVDHIVPQSFLKDDSIDNKVLTRSDKARGKSDNVPSEEVVKKMKNYWR | |
| | QLLNAKLITQRKFDNLTKAERGGLSELDKAGFIKRQLVETRQITKHVAQILD | |
| | SRFNTEFDENNKLIREVKIITLKSKLVSDFRKDFGFYKVREINDYHHAHDAY | |
| | LNAVVGTALIKKYPKLESEFVYGDYKVYDVRKLIAKSEQEIGKATAKYFFYS | |
| | NIMNFFKSEVTLANGEIRKRPLIETNEETGEIVWDKEKDFATVKKVLSMPQV | |
| | NIVKKTEVQTGGFSKESILPKRNSDKLIARKKDWDTKKYGGFDSPTVAYSVL | |
| | VVAKVEKGKAKKLKSVKELVGITIMERSSFEKDPIAFLEDKGYKNVQKDLII | |
| | KLPKYSLFELENGRKRLLASAGELQKGNELALPNKYVNFLYHASHYEKLKGK | |
| | SEDNEKKRLYVEEHRHYFDEIFEQIIEFSERYILADANLEKIKSLFKENEDK | |
| | SISELAENFIHLFTLTALGAPAAFKFFDKDIDRKRYTSTTEILNATLIHQSI | |
| | TGLYETRIDLSQLGGD | |
| CasEnd-218 | MKKPYSIGLDIGTNSVGWAVVTDDYKVPSKKMKVLGNTDRSSIKKNLLGALL | 178 |
| | FDSGETAEATRLKRTARRRYTRRKNRILYLQEIFAEEMNKVDESFFHRLEDS | |
| | FLVEEDKRGERHPIFGTIVEEVKYHEEFPTIYHLRKHLADSPEKADLRLVYL | |
| | ALAHIIKFRGHFLIEGDLDTENTDVQSLFKEFLEVYDETFENSHLSEETVDV | |
| | EEILTDKISKSRKKERLLKLFPTEKSNGQFAEFLKLIVGNQANFKKVFELSE | |
| | KAKLQFSKDTYEEDLEILLGKIGDEYADVFVSAKNLYDSILLSGILTVTDLS | |
| | TKAPLSASMVKRYEEHHEDLTKLKKFIRENLPEKYKEVFFDESKNGYAGYID | |
| | GGTKQEDFYKYLKKLLSKIAGSEYFLEKIEREDFLRKQRTFDNGSIPHQIHL | |
| | QEMKAIIRRQAEYYPFLKENQDKIEQILTFRIPYYVGPLARGNSRFAWASRK | |
| | SDETITPWNFDDIIDKEKSAEAFINRMTNYDLYLPEEKVLPKHSLLYEKFTV | |
| | YNELTKVKYITEQGGKTEFFDANMKQEIFDGVFKKERKVTKKKLLNFLDKEF | |
| | DEFRIVDLSGVEKAFNASLGTYHDLKKILGDKEFLDDPENEGMLEDIVLTLT | |
| | LFEDREMIKKRLEKYSDIFTKEQLKKLERRHYTGWGRLSAKLINGIRDKETN | |
| | KTILDYLIDDGYSNRNFMQLIHDDALSFKEEIAKAQVIGETDSLHEVVAELA | |
| | GSPAIKKGILQSLKIVDELVKVMGRYNPENIVVEMARENQTTNKGQRNSRER | |
| | LKGLTDAIKELGSDILKEHPVDNQQLQNDRLYLYYLQNGKDMYTGETLDIDN | |
| | LSQYDVDHIIPQSFIKDDSIDNRVLVSSAKARGKSDDVPSIEVVHKMKSEWN | |
| | KLLNAKLISQRKYDNLTKAERGGLTDDDKAGFIKRQLVETRQITKHVAQILD | |
| | ERFNTERDENNKLIRKVKIVTLKSKLVSNFRKDFELYKVREINDYHHAHDAY | |
| | LNAVVGKALITKYPQLEPEFVYGDYPKFNSYKLERKKDSERGKATAKMFFYS | |
| | NLMNFFKSDVKLADGTVVERPIIEVNDENGEIAWKKTKHVSNVKKVLSMPQV | |
| | NIVKKTEVQTGGFSKESILPKRNSDKLIARKKKWDTKKYGGFDSPIVAYSVL | |
| | VIADIEKGKAKKLKTVKELVGITIMEKSRFEKDPVAFLENKGYQNIQEENII | |
| | KLPKYSLFSLENGRKRLLASAGELQKGNELALPNHLVTLLYHAKNIEKDDEK | |
| | KKDIPKHLEYVKKHRSEFKELFDQVSEFSKRYILADKNLEKIEELYTQNEEA | |
| | DVKELASSFINLLTFTAIGAPADFKFFGKDIDRKRYTSTTECLNATLIHQSI | |
| | TGLYETRIDLSKLGED | |
| CasEnd-219 | MDKKYSIGLDIGTNSVGWAVITDEYKVPSKKFKVLGNTDRHSIKKNLIGALL | 179 |
| | FDSGETAEATRLKRTARRRYTRRKNRICYLQEIFSNEMAKVDDSFFHRLEES | |
| | FLVEEDKKHERHPIFGNIVDEVAYHEKYPTIYHLRKKLADSTEKADLRLIYL | |
| | ALAHIIKFRGHFLIEGDLNPENSDVDKLFIQLVQTYNQLFEENPINESGVDA | |
| | KAILSAKLSKSRRLENLIAQFPGEKKNGLFGNLIALSLGLTPNFKSNFDLAE | |
| | DAKLQLSKDTYDEDLDNLLAQIGDQYADLFLAAKNLSDAILLSDILTVNSEI | |
| | TKAPLSASMIKRYDEHHQDLTLLKALVRQQLPEKYKEIFFDKSKNGYAGYID | |
| | GGASQEEFYKYIKPILEKMDGTEELLAKLNREDFLRKQRTFDNGSIPHQIHL | |
| | GELHAILRRQEEFYPFLKENREKIEKILTFRIPYYVGPLARGNSRFAWMTRK | |
| | SDETITPWNFEEVVDKGASAQAFIERMTNFDKNLPNEKVLPKHSLLYEYFTV | |
| | YNELTKVKYVTEGMRKPEFLSGEQKEEIVDLLFKKNRKVTVKQLKDDYFKEI | |
| | ECFDSVEISGVEDAFNASLGTYHDLLKIIKDKDFLDNEENEDILEDIVLTLT | |
| | LFEDREMIEERLKKYANLFDDKVLKQLKRRRYTGWGRLSRKLINGIRDKQSG | |
| | KTILDFLKSDGFANRNFMQLIHDDSLTFKEEIKKAQVSGQGDSLHEHIANLA | |
| | GSPAIKKGILQTVKVVDELVKVMGRHKPENIVIEMARENQTTQKGQKNSRER | |
| | MKRIEEGIKELGSQILKEHPVENTQLQNEKLYLYYLQNGRDMYVDQELDINR | |
| | LSDYDVDHIVPQSFLKDDSIDNKVLTRSDKARGKSDNVPSEEVVKKMKNYWR | |
| | QLLNAKLITQRKFDNLTKAERGGLSELDKAGFIKRQLVETRQITKHVAQILD | |
| | SRMNTKYDENDKLIREVKVITLKSKLVSDFRKDFQFYKVREINNYHHAHDAY | |
| | LNAVVGTALIKKYPKLESEFVYGDYKVYDVRKMIAKSEQEIGKATAKYFFYS | |
| | NIMNFFKTEITLANGEIRKRPLIETNGETGEIVWDKGRDFATVRKVLSMPQV | |
| | NIVKKTEVQTGGFSKESILPKRNSDKLIARKKDWDTKKYGGFDSPTVAYSVL | |
| | VVAKVEKGKSKKLKTVKELVGITIMERSSFEKDPVAFLEAKGYKNVQKDLII | |
| | KLPKYSLFELENGRKRMLASAGELQKGNELALPSKYVTLLYHASNYEKLKGK | |
| | PEDEEKKLEYVEQHRHYFDEIFDQISEFSERYILADKNLEKILSLYNKFEDK | |
| | SIREQAENFINLFTLTALGAPAAFKFFGTTIDRKRYTSTKEILNSTLIHQSI | |
| | TGLYETRIDLSQLGGD | |
| CasEnd-220 | MKKPYSIGLDIGTNSVGWAVVTDDYKVPSKKMKVLGNTDRSSIKKNLLGALL | 180 |
| | FDSGETAEATRLKRTARRRYTRRKNRILYLQEIFAEEMNKVDDSFFHRLEDS | |
| | FLVEEDKRGERHPIFGNIVDEVAYHEKFPTIYHLRKHLADSTEKADLRLVYL | |
| | ALAHIIKFRGHFLIEGDLDSENTDVQKLFKQFVEAYDRTFEESHLSEETVDA | |
| | EAILTEKISKSRKLENLLKQFPNEKKNGFFGNLIALSLGLQPNFKKNFGLSE | |
| | DAKLQFSKDTYDEDLENLLGQIGDEYADLFVAAKNLYDAILLSGILTVNDSS | |
| | TKAPLSASMIKRYDEHHEDLTLLKKFIRKQLPEKYKEIFFDESKNGYAGYID | |
| | GGTSQEEFYKYIKPILSKIDGSEYFLDKIEREDFLRKQRTFDNGSIPHQIHL | |
| | QELKAILRRQGEYYPFLKENQEKIEKILTFRIPYYVGPLARGNSRFAWMERK | |
| | SDETITPWNFDEVVDKEKSAEAFIERMTNNDLYLPEEKVLPKHSLLYEKFTV | |
| | YNELTKVKYVTEGMGKAQFFDANMKQEIFDGLFKKERKVTKKKLLDFLDKEF | |
| | DEFRIVDISGVEDRFNASLGTYHDLLKIIKDKDFLDNEENEEILEDIILTLT | |
| | LFEDREMIKKRLEKYADLFDKKVLKKLERRHYTGWGRLSAKLINGIRDKQTG | |
| | KTILDYLIDDGRANRNFMQLIHDDSLSFKEEIKKAQVIGQEDSLHEVVANLA | |
| | GSPAIKKGILQSLKIVDELVKVMGRYEPENIVVEMARENQTTAKGQRNSRER | |
| | LKRLEEAIKNLGSNILKEHPVENQQLQNDRLYLYYLQNGKDMYTGEELDIDK | |
| | LSQYDVDHIIPQSFIKDDSIDNRVLVSSAKARGKSDDVPSIEVVKKMKSFWS | |
| | KLLSAKLISQRKFDNLTKAERGGLTEEDKAGFIKRQLVETRQITKHVAQILD | |
| | ERFNTEFDENNKLIRKVKIITLKSKLVSDFRKEFEFYKVREINDYHHAHDAY | |
| | LNAVVGKALIKKYPKLEPEFVYGDYPKYNSFKMIAKSDKERGKATAKMFFYS | |
| | NIMNFFKTDVKLADGTIVERPVIEVNDETGEIVWDKEKHIATVKKVLSMPQV | |
| | NIVKKTEVQTGGFSKESILPKRNSDKLIARKKKWDTKKYGGFDSPTVAYSVL | |
| | VVADIEKGKSKKLKTVKELVGITIMERSRFEKNPVAFLEAKGYQNIQEEKII | |
| | KLPKYSLFELENGRKRLLASAGELQKGNELALPNKLVTLLYHAKRIEKLDEK | |
| | PEDLPKHLEYVEKHKSEFDELLNQVSEFSERYILADKNLEKIEELYKQNNDS | |
| | SIEELASSFINLLTFTALGAPADFKFFGTTIDRKRYTSTTEILNATLIHQSI | |
| | TGLYETRIDLSKLGGD | |
| CasEnd-221 | MDKKYSIGLDIGTNSVGWAVITDEYKVPSKKFKVLGNTDRHSIKKNLIGALL | 181 |
| | FDSGETAEATRLKRTARRRYTRRKNRICYLQEIFSNEMAKVDPSFFQRLEES | |
| | FLVEEDKSGSRHPIFGNIVEEVAYHEKYPTIYHLRKKLVDSKEKADLRLIYL | |
| | ALAHMIKFRGHFLIEGDLNPDNSDVDKLFIQLVQTYNQLFEENPINASGVDA | |
| | KAILSARLSKSRRLENLIAQLPGEKKNGLFGNLIALSLGLTPNFKSNFDLAE | |
| | DAKLQLSKDTYDDDLDNLLAQIGDQYADLFLAAKNLSDAILLSDILRVDTSE | |
| | TRAPLSASMIKRYDDHHQDLTKLKELVRKELPEKYKTIFFDQNANGYAGYID | |
| | GGATQEEFYKAIKPILESMSGTKELLDKLEKKDLLRKQRTFDNGSIPHQIHL | |
| | GELRAILERQEKFYPFLKENRERIEKILTFRIPYYVGPLARGNSRFAWMTRK | |
| | SEETITPWNFEEVVDKGASAQSFIERMTNFDKNLPNEKVLPKHSLLYEYFTV | |
| | YNELTKVKYVTEGMRKPAFLSGEQKKAIVDLLFKTNRKVTVKQLKEDYFKKI | |
| | ECFDSVEISGVEDRFNASLGTYHDLLKIIKDKDFLDNEENEDILEDIVLTLT | |
| | LFEDREMIEERLKTYAHLEDDKVMKQLKRRRYTGWGRLSRKLINGIRDKQSG | |
| | KTILDFLKSDGFANRNFMQLIHDDSLTFKEDIQKAQVSGQGDSLHEHIANLA | |
| | GSPAIKKGILQTVKVVDELVKVMGRHKPENIVIEMARENQTTQKGQKNSRER | |
| | MKRIEEGIKELGSQILKEHPVENTQLQNEKLYLYYLQNGRDMYVDQELDINR | |
| | LSDYDVDHIVPQSFLKDDSIDNKVLTRSDKARGKSDNVPSEEVVKKMKNYWR | |
| | QLLNAKLITQRKFDNLTKAERGGLSELDKAGFIKRQLVETRQITKHVAQILD | |
| | SRMNTKYDENDKLIREVKVITLKSKLVSDFRKDFQFYKVREINNYHHAHDAY | |
| | LNAVVGTALIKKYPKLESEFVYGDYKVYDVRKMIAKSEQEIGKATAKYFFYS | |
| | NIMNFFKTEITLANGEIRKRPLIETNGETGEIVWDKGRDFATVRKVLSMPQV | |
| | NIVKKTEVQTGGFSKESILPKRDSDKLIARKKDWDPKKYGGFDSPTVAYSVL | |
| | VVAKKEVGEEKELKEVKELLGITIMERSEFEKNPLAFLEKKGYKDVKMDKII | |
| | KLPKYSLFELGNGRKRMLASAGELQKGNELALPSEYVNFLYLASDYEKLKGK | |
| | EEEKKKKQEYVEKNKHYLDEIINQISEFSKRVIKADANLEKVLKAYEKHKDK | |
| | PIKEQAENIIHLFTLTRLGAPAAFKYFDEVIDRKRYTSTKEVLDATLIHQSI | |
| | TGLYETRIDLSFLGGD | |
| CasEnd-222 | MDKKYSIGLDIGTNSVGWAVITDEYKVPSKKFKVLGNTDRHSIKKNLIGALL | 182 |
| | FDSGETAEATRLKRTARRRYTRRKNRICYLQEIFSNEMAKVDDSFFHRLEES | |
| | FLVEEDKRNERHPIFGNIVDEVAYHEKYPTIYHLRKHLADSTEKADLRLIYL | |
| | ALAHIIKFRGHFLIEGDLNAENTDVQKLFEQFVQTYDNTFEESHLEEITVDA | |
| | EAILTDKLSKSRRLENLIKQFPNEKKNGLFGNLIALSLGLQPNFKSNFKLSE | |
| | DAKLQFSKDTYDEDLENLLGQIGDEYADLFVAAKNLYDAILLSGILTVNDVS | |
| | TKAPLSASMIKRYDEHHQDLTLLKKFVRKQLPEKYKEIFFDESKNGYAGYID | |
| | GGASQEEFYKYIKPLLEKMDGSEYFLDKIEREDFLRKQRTFDNGSIPHQIHL | |
| | QELHAILRRQEDYYPFLKENQEKIEKILTFRIPYYVGPLARGNSRFAWLSRK | |
| | SDETITPWNFEEVVDKEASAEAFIERMTNFDKNLPEEKVLPKHSLLYEKFTV | |
| | YNELTKVKYVTEGMGKPEFFDAEMKQEIFDGLFKKNRKVTKKKLLDFLFKEF | |
| | DEFRIVDISGVEKAFNASLGTYHDLLKIIKDKDFLDNEENEDILEDIILTLT | |
| | LFEDREMIEERLQKYADLFDKKQLKKLKRRRYTGWGRLSKKLINGIRDKQSG | |
| | KTILDYLIDDGFANRNFMQLIHDDSLSFKEEIKKAQVIGQGDSLHEHIANLA | |
| | GSPAIKKGILQTVKVVDELVKVMGRHKPENIVIEMARENQTTQKGQRNSRER | |
| | LKRLEESIKELGSDILKEHPVENTQLQNDKLYLYYLQNGKDMYTGEELDIDR | |
| | LSDYDVDHIIPQSFIKDDSIDNRVLTSSAKARGKSDDVPSEEVVKKMKSFWR | |
| | QLLKAKLISQRKFDNLTKAERGGLSELDKAGFIKRQLVETRQITKHVAQILD | |
| | SRMNTKYDENDKLIREVKVITLKSKLVSDFRKDFQFYKVREINNYHHAHDAY | |
| | LNAVVGTALIKKYPKLESEFVYGDYKVYDVRKMIAKSEQEIGKATAKYFFYS | |
| | NIMNFFKTEITLANGEIRKRPLIETNGETGEIVWDKGRDFATVRKVLSMPQV | |
| | NIVKKTEVQTGGFSKESILPKRNSDKLIARKKDWDTKKYGGFDSPTVAYSVL | |
| | VVAKIEKGKAKKLKTVKELVGITIMERSSFEKNPVAFLEKKGYKNIQEELII | |
| | KLPKYSLFELENGRKRLLASAGELQKGNELALPQKYVTLLYHAKNYEKLKEE | |
| | PEDKEKHLEYVEEHRSEFKEILDQISEFSKRYILADKNLEKIEELYEKNENA | |
| | SIEELASSFINLLTFTALGAPAAFKFFGTTIDRKRYTSTKEILNATLIHQSI | |
| | TGLYETRIDLSKLGGD | |
| CasEnd-223 | MDKKYSIGLDIGTNSVGWAVITDEYKVPSKKFKVLGNTDRHSIKKNLIGALL | 183 |
| | FDSGETAEATRLKRTARRRYTRRKNRIRYLQEIFSEEMSKVDDSFFHRLEES | |
| | FLVEEDKKHERHPIFGNIVDEVAYHEKYPTIYHLRKKLADSTEKADLRLIYL | |
| | ALAHIIKFRGHFLIEGDLNSDNSDVQKLFIQLVQTYNQLFEENPINESGVDA | |
| | KAILSAKLSKSRRLENLIAQLPGEKKNGLFGNLIALSLGLTPNFKSNFDLAE | |
| | DAKLQLSKDTYDDDLDNLLAQIGDQYADLFLAAKNLSDAILLSDILTVNDEI | |
| | TKAPLSASMIKRYDEHHQDLTLLKALVRQQLPEKYKEIFFDQSKNGYAGYID | |
| | GGASQEEFYKFIKPILEKMDGTEELLAKLNREDFLRKQRTFDNGSIPHQIHL | |
| | GELHAILRRQEDFYPFLKENREKIEKILTFRIPYYVGPLARGNSRFAWMTRK | |
| | SEETITPWNFEEVVDKEASAQAFIERMTNFDKNLPNEKVLPKHSLLYEYFTV | |
| | YNELTKVKYVTEGMRKPEFLSGEQKEEIVDLLFKKNRKVTVKQLKEDYFKKI | |
| | ECFDSVEISGVEDRFNASLGTYHDLLKIIKDKDELDNEENEDILEDIVLTLT | |
| | LFEDREMIENRLKKYAHLFDKKVLKQLKRRRYTGWGRLSRKLINGIRDKQSG | |
| | KTILDFLKSDGFANRNFMQLIHDDSLTFKEAIQKAQVSGQGDSLHEQIANLA | |
| | GSPAIKKGILQTVKIVDELVKVMGRHKPENIVIEMARENQTTQKGQKNSRER | |
| | MKRIEEGIKELGSQILKEHPVENTQLQNEKLYLYYLQNGRDMYVDQELDINR | |
| | LSDYDVDHIVPQSFLKDDSIDNKVLTRSDKARGKSDNVPSEEVVKKMKNYWR | |
| | QLLNAKLITQRKFDNLTKAERGGLSELDKAGFIKRQLVETRQITKHVAQILD | |
| | SRFNTEYDENDKLIREVKIITLKSKLVSDFRKDFQFYKVREINNYHHAHDAY | |
| | LNAVVGTALIKKYPKLESEFVYGDYKVYDVRKMIAKSEQEIGKATAKYFFYS | |
| | NIMNFFKSEITLANGEIRKRPLIETNEETGEIVWDKGKDFATVRKVLSMPQV | |
| | NIVKKTEVQTGGFSKESILPKRNSDKLIARKKDWDTKKYGGFDSPTVAYSVL | |
| | VVAKVEKGKSKKLKTVKELVGITIMERSSFEKDPVAFLEDKGYKEIQKDLII | |
| | KLPKYSLFELENGRKRLLASAGELQKGNELALPSKYVTFLYLASHYEKLKGK | |
| | PEDNEQKLEYVEQHKHYFDEIFQQISEFSERYILADKNLEKILELYNEHRDS | |
| | SIVELAENFIHLFTFTALGAPAAFKFFDTTIDRKRYTSTTEILNATLIHQSI | |
| | TGLYETRIDLSQLGGD | |
| CasEnd-224 | MKKKYSIGLDIGTNSVGWAVITDEYKVPSKKFKVLGNTDRQSIKKNLLGALL | 184 |
| | FDSGETAEATRLKRTARRRYTRRKNRIRYLQEIFAEEMSKVDDSFFHRLEES | |
| | FLVEEDKLYERHPIFGNIVDEVAYHEKYPTIYHLRKKLADSTEKADLRLIYL | |
| | ALAHIIKFRGHFLIEGDLNSDNTDVDKLFIQLVQTYNQLFEENPINEETVDA | |
| | KAILSAKLSKSRRLENLIALFPGEKRNGLFGNLIALSLGLTPNFKSNFDLAE | |
| | DAKLQLSKDTYDEDLDNLLAQIGDQYADLFLAAKNLSDAILLSGILTVKDGI | |
| | TKAPLSASMIKRYDEHHQDLTLLKKLVREQLPEKYKEIFFDESKNGYAGYID | |
| | GGASQEEFYKFIKPILEKMDGTEELLAKIDREDFLRKQRTFDNGSIPHQIHL | |
| | GELKAILRRQEKFYPFLKENREKIEKILTFRIPYYVGPLARGNSRFAWMIRK | |
| | SEETITPWNFEEVVDKEASAQAFIERMTNFDKNLPDEKVLPKHSLLYEYFTV | |
| | YNELTKVKYVTEGMKKPEFLSSEQKEAIVDLLFKKNRKVTVKQLKEFYFSKI | |
| | ECFDSVEISGVEDRFNASLGTYHDLLKIIKDKEFLDNEENEDILEDIVLTLT | |
| | LFEDKEMIEKRLKKYADLFDKKVLKQLKRRRYTGWGRLSRKLINGIRDKQSG | |
| | KTILDFLKSDGFANRNFMQLIHDDSLTFKEEIKKAQVSGQGDSLHEVIANLA | |
| | GSPAIKKGILQTVKIVDEIVKVMGRHAPENIVIEMARENQTTQKGQKNSRER | |
| | MKRLEEGIKELGSQILKEHPVENTQLQNDKLYLYYLQNGKDMYTGEELDIDR | |
| | LSDYDVDHIIPQSFIKDDSIDNKVLTSSEKARGKSDNVPSEEVVKKMKNYWR | |
| | QLLNAKLISQRKFDNLTKAERGGLSELDKAGFIKRQLVETRQITKHVAQILD | |
| | SRFNTKRDENDKLIRDVKIITLKSKLVSDFRKDFGFYKVREINDYHHAHDAY | |
| | LNAVVGTALIKKYPKLESEFVYGDYKVYDSRKMIAKSEQEIGKATAKRFFYS | |
| | NIMNFFKSEIKLADGEIIKRPLIETNEETGEIVWDKGKDFATVRKVLSMPQV | |
| | NIVKKTEVQTGGFSKESILPKRDSDKLIARKKDWDTKKYGGFDSPTVAYSVL | |
| | VVAKVEKGKSKKLKTVKELVGITIMERSSFEKDPIAFLEAKGYKDIQKDLII | |
| | KLPKYSLFELENGRKRLLASAGELQKGNELALPSKYVTFLYHASNYEKLKGK | |
| | PEDEEKKREYVEQHNHEFDEILDQISEFSKRYILADKNLEKILSLYNKFRDK | |
| | SIREQAENFINLFTLTALGAPAAFKFFDKTIDRKRYTSTKEILNATLIHQSI | |
| | TGLYETRIDLSKLGGD | |
| CasEnd-225 | MDKKYSIGLDIGTNSVGWAVITDEYKVPSKKFKVLGNTDRHSIKKNLIGALL | 185 |
| | FDSGETAEATRLKRTARRRYTRRKNRICYLQEIFSNEMAKVDPSFFERLEES | |
| | FLVEEDKKYSRHPIFGNIVEEVAYHEKYPTIYHLRKKLVDSEEKADLRLIYL | |
| | ALAHMIKFRGHFLIEGDLNPDNSDVDKLFIQLVQTYNQLFEENPINASGVDA | |
| | KAILSARLSKSRRLENLIAQLPGEKKNGLFGNLIALSLGLTPNFKSNFDLAE | |
| | DAKLQLSKDTYDDDLDNLLAQIGDQYADLFLAAKNLSDAILLSDILRVDTKE | |
| | TKAPLSASMIKRYDDHHQDLTLLKELVRKELPEKYKEIFFDQNKAGYAGYID | |
| | GGATQEEFYKYIKPILESMSGTKELLEKLENRDLLRKQRTFDNGSIPHQIHL | |
| | GELRAILERQEKFYPFLKENREKIEKILTFRIPYYVGPLARGNSRFAWMTRK | |
| | SEETITPWNFEEVVDKGASAQSFIERMTNFDKNLPNEKVLPKHSLLYEYFTV | |
| | YNELTKVKYVTEGMRKPAFLSGEQKKAIVDLLFKTNRKVTVKQLKEDYFKKI | |
| | ECFDSVEISGVEDRFNASLGTYHDLLKIIKDKDFLDNEENEDILEDIVLTLT | |
| | LFEDREMIEERLKTYAHLEDDKVMKQLKRRRYTGWGRLSRKLINGIRDKQSG | |
| | KTILDFLKSDGFANRNFMQLIHDDSLTFKEDIQKAQVSGQGDSLHEHIANLA | |
| | GSPAIKKGILQTVKVVDELVKVMGRHKPENIVIEMARENQTTQKGQKNSRER | |
| | MKRIEEGIKELGSQILKEHPVENTQLQNEKLYLYYLQNGRDMYVDQELDINR | |
| | LSDYDVDHIVPQSFLKDDSIDNKVLTRSDKARGKSDNVPSEEVVKKMKNYWR | |
| | QLLNAKLITQRKFDNLTKAERGGLSELDKAGFIKRQLVETRQITKHVAQILD | |
| | SRMNTKYDENDKLIREVKVITLKSKLVSDFRKDFQFYKVREINNYHHAHDAY | |
| | LNAVVGTALIKKYPKLESEFVYGDYKVYDVRKMIAKSEQEIGKATAKYFFYS | |
| | NIMNFFKTEITLANGEIRKRPLIETNGETGEIVWDKGRDFATVRKVLSMPQV | |
| | NIVKKTEVQTGGFSKESILPKRDSDKLIARKKDWDPKKYGGFDSPTVAYSVL | |
| | VVAKKEVGKEKKLVEVKDLLGITIMERSKFEKDPLKFLEEKGYKDVKMDEII | |
| | KLPKYSLFELGNGRKRMLASAGELQKGNELALPSEYVNFLYLASNYEKLKGK | |
| | EEEKKKKQEYVEKNKSYLDDIINQISEFSKRVIGADANLEKVLAAYKKHKNK | |
| | PISEQAENIIHLFTLTRLGAPAAFKYFDETIDRKRYTSTKEVLDATLIHQSI | |
| | TGLYETRIDLSFLGGD | |
| CasEnd-226 | MDKKYSIGLDIGTNSVGWAVITDEYKVPSKKFKVLGNTDRHSIKKNLIGALL | 186 |
| | FDSGETAEATRLKRTARRRYTRRKNRICYLQEIFSNEMAKVDDSFFHRLEES | |
| | FLVEEDKQGDRHPIFGNIVEEVAYHEKYPTIYHLRKELADSTEKADLRLVYL | |
| | ALAHIIKFRGHFLIEGDLNPENTDVQKLFKDFVEIYNQTFEESPLNEEKVDA | |
| | KSILTEKLSKSRRLENLIAQFPNEKKNGLFGNLIALILGLQPNFKSNFQLAE | |
| | DAKLQFSKDTYDEDLENLLGQIGDEYADLFVAAKNLYDAILLSGILTVSDAT | |
| | TKAPLSASMIKRYDEHHQDLTLLKTFVRENLPEKYKEIFFDESKNGYAGYID | |
| | GGASQEEFYKYIKKLLEKIDGSEYFLEKIDREDFLRKQRTFDNGSIPHQIHL | |
| | QELHAILRRQEEFYPFLKENREKIEKILTFRIPYYVGPLARGNSRFAWMTRK | |
| | SDETITPWNFDEIVDKEKSAEAFIERMTNNDKNLPDEKVLPKHSLLYEKFTV | |
| | YNELTKVKYVTEGMGKPKFFDANQKQEIFDGLFKKYRKVTKKKLLDFLDKEF | |
| | DEFRIVDISGVEKAFNASLGTYHDLKKIIKDKAFLDNEENEKILEDIILTLT | |
| | LFEDREMIRQRLEKYADLFDKKQLKKLERRRYTGWGRLSAKLINGIRDKQTG | |
| | KTILDYLIDDGRANRNFMQLIHDDSLSFKEEIAKAQVAGEGDSLHEHIANLA | |
| | GSPAIKKGILQTVKVVDELVKVMGRHKPENIVIEMARENQTTQKGQKNSRER | |
| | MKRIEEGIKELGSQILKEHPVENTQLQNEKLYLYYLQNGRDMYVDQELDINR | |
| | LSDYDVDHIVPQSFLKDDSIDNKVLTRSDKARGKSDNVPSEEVVKKMKNYWR | |
| | QLLNAKLITQRKFDNLTKAERGGLSELDKAGFIKRQLVETRQITKHVAQILD | |
| | SRMNTKYDENDKLIREVKVITLKSKLVSDFRKDFQFYKVREINNYHHAHDAY | |
| | LNAVVGTALIKKYPKLESEFVYGDYKVYDVRKMIAKSEQEIGKATAKYFFYS | |
| | NIMNFFKTEITLANGEIRKRPLIETNGETGEIVWDKGRDFATVRKVLSMPQV | |
| | NIVKKTEVQTGGFSKESILPKRDSDKLIARKKDWDTKKYGGFDSPTVAYSVL | |
| | VVADIEKGKSKKLKTVKELIGITIMERSKFEKDPVAFLEQKGYQNIKEDKII | |
| | KLPKYSLFELENGRKRLLASAGELQKGNELALPNKYVTLLYHAKHYEKLKEQ | |
| | QEDIEGHREYVEKHRDEFDELLDQINEFSERYILADKNLSKIEELYAQNLEY | |
| | SIEELANSFINLLTFTALGAPAAFKFFGNTIDRKRYTSTKEILNATLIHQSI | |
| | TGLYETRIDLSKLGGD | |
| CasEnd-227 | MDKKYSIGLDIGTNSVGWAVITDEYKVPSKKFKVLGNTDRHSIKKNLIGALL | 187 |
| | FDSGETAEATRLKRTARRRYTRRKNRICYLQEIFSNEMAKVDPSFFQRLEES | |
| | FLVEEDKSGSRHPIFGNIVDEVAYHEKYPTIYHLRKKLVDSDEKADLRLIYL | |
| | ALAHMIKFRGHFLIEGDLNPDNSDVDKLFIQLVQTYNQLFEENPINASGVDA | |
| | KAILSARLSKSRRLENLIAQLPGEKKNGLFGNLIALSLGLTPNFKSNEDLAE | |
| | DAKLQLSKDTYDDDLDNLLAQIGDQYADLFLAAKNLSDAILLSDILRVDTSE | |
| | TKAPLSASMIKRYDEHHQDLTLLKELVRKYLPEKYKEIFFNQNNNGYAGYID | |
| | GGATQEEFYEYIKPILESMPGTKELLEKLEKRDLLRKQRTEDNGSIPHQIHL | |
| | GELKAILERQEKFYPFLKENREKIEKILSFRIPYYVGPLARGNSRFAWMTRK | |
| | SEETITPWNFEEVVDKGASAQSFIERMTNFDKNLPNEKVLPKHSLLYEYFTV | |
| | YNELTKVKYVTEGMRKPAFLSGEQKKAIVDLLFKTNRKVTVKQLKEDYFKKI | |
| | ECFDSVEISGVEDRFNASLGTYHDLLKIIKDKDELDNEENEDILEDIVLTLT | |
| | LFEDREMIEERLKTYAHLFDDKVMKQLKRRRYTGWGRLSRKLINGIRDKQSG | |
| | KTILDFLKSDGFANRNFMQLIHDDSLTFKEDIQKAQVSGQGDSLHEHIANLA | |
| | GSPAIKKGILQTVKVVDELVKVMGRHKPENIVIEMARENQTTQKGQKNSRER | |
| | MKRIEEGIKELGSQILKEHPVENTQLQNEKLYLYYLQNGRDMYVDQELDINR | |
| | LSDYDVDHIVPQSFLKDDSIDNKVLTRSDKARGKSDNVPSEEVVKKMKNYWR | |
| | QLLNAKLITQRKFDNLTKAERGGLSELDKAGFIKRQLVETRQITKHVAQILD | |
| | SRMNTKYDENDKLIREVKVITLKSKLVSDFRKDFQFYKVREINNYHHAHDAY | |
| | LNAVVGTALIKKYPKLESEFVYGDYKVYDVRKMIAKSEQEIGKATAKYFFYS | |
| | NIMNFFKTEITLANGEIRKRPLIETNGETGEIVWDKGRDFATVRKVLSMPQV | |
| | NIVKKTEVQTGGFSKESILPKRDSDKLIARKKDWDPKKYGGFDSPTVAYSVL | |
| | VVAKKEVGKEKKLVEVKELLGITIMERSEFEKDPLGFLEKKGYKDVKKDKII | |
| | KLPKYSLFELGNGRKRMLASAGELQKGNELALPSEYVNFLYLASNYEKLKGD | |
| | PEEIKKKQEYVEKNKHYLDEIIEQISEFSKRVIKADANLEKVLEAYKKHKDK | |
| | PISEQAENIIHLFTLTALGAPAAFKYFDEVIDRKRYTSTKEVLDATLIHQSI | |
| | TGLYETRIDLKFLGGD | |
| CasEnd-228 | MKKPYSIGLDIGTNSVGWAVVTDDYKVPAKKMKVLGNTDKSHIKKNLLGALL | 188 |
| | FDSGNTAEDRRLKRTARRRYTRRRNRILYLQEIFSEEMGKVDDSFFHRLEDS | |
| | FLVPEDKRGERHPIFGNLEEEVKYHENFPTIYHLRKYLADNPEKADLRLVYL | |
| | ALAHIIKFRGHFLIEGKLDTRNNDVQRLFQEFLAVYDNTFEESSLQEQNVQV | |
| | EEILTDKISKSAKKDRVLKLFPNEKSNGRFAEFLKLIVGNQADFKKHFELEE | |
| | KAPLQFSKDTYEEDLETLLAQIGDDYADLFLSAKKLYDSILLSGILTVTDVS | |
| | TKAPLSASMIQRYNEHQMDLTQLKQFIRQKLPDKYNEVESDVSKDGYAGYID | |
| | GKTNQEDFYKYLKKLLNKIEGSGYFLDKIEREDFLRKQRTFDNGSIPHQIHL | |
| | QEMRAIIRRQAEFYPFLAENQDKIEKILTFRIPYYVGPLARGKSDFAWLSRK | |
| | SAEKITPWNFDEIVDKESSAEAFINRMTNYDLYLPNQKVLPKHSLLYEKFTV | |
| | YNELTKVKYKTEQMGKTAFFDANMKQEIFDGVFKVYRKVTKDKLMDFLEKEF | |
| | DEFRIVDLTGLDKAFNASYGTYHDLRKILKDKDFLDNSKNEKILEDIVLTLT | |
| | LFEDREMIRKRLENYSDLLTKEQVKKLERRHYTGWGRLSAKLIHGIRNKESR | |
| | KTILDYLIDDGNSNRNFMQLINDDALSFKEEIAKAQVIGETDNLNQVVSDIA | |
| | GSPAIKKGILQSLKIVDELVKIMGGHQPENIVVEMARENQFTNQGRRNSQQR | |
| | LKGLTDSIKEFGSQILKEHPVENSQLQNDRLFLYYLQNGRDMYTGEELDIDY | |
| | LSQYDIDHIIPQAFIKDDSIDNRVLVSSKEARGKSDDVPSKDVVRKMKSYWS | |
| | KLLSAKLITQRKFDNLTKAERGGLTDDDKAGFIKRQLVETRQITKHVARILD | |
| | ERFNTETDENNKKIRQVKIVTLKSNLVSNFRKEFELYKVREINDYHHAHDAY | |
| | LNAVVGKALLGKYPKLEPEFVYGDYPKFNSHKLFSKSKKEENKATAKKFFYS | |
| | NIMNFFKKDVKLADGSIVERPQIEVNDETGEIIWDKDKHISNVKKVLSYPQV | |
| | NIVKKVEEQTGGFSKESILPKGNSDKLIPRKTKWDTKKYGGFDSPIVAYSVL | |
| | VIADIEKGKSKKLKTVKELVGITIMEKMTFEKDPVAFLERKGYRNIQEENII | |
| | KLPKYSLFELENGRKRLLASARELQKGNEIVLPNHLVTLLYHAKNIHKVDEK | |
| | EEDIPKHLDYVDKHRDEFKELLDVVSNFSKKYTLAEGNLEKIKELYAQNNSA | |
| | DIKELASSFINLLTFTAIGAPATFKFFDKNIDRKRYTSTTEILNATLIHQSI | |
| | TGLYETRIDLSKLGGD | |
| CasEnd-229 | MKKKYSIGLDIGTNSVGWAVITDEYKVPSKKFKVLGNTDRHSIKKNLLGALL | 189 |
| | FDSGETAEATRLKRTARRRYTRRKNRIRYLQEIFAEEMSKVDDSFFHRLEES | |
| | FLVEEDKKHERHPIFGNIVDEVAYHEKYPTIYHLRKHLADSKEKADLRLIYL | |
| | ALAHIIKFRGHFLIEGDLNSENSDVQKLFIQLVQTYNQLFEENPINEETVDA | |
| | KAILSEKLSKSRRLENLIAQFPGEKKNGLFGNLIALSLGLTPNFKANFDLSE | |
| | DAKLQFSKDTYDEDLENLLAQIGDQYADLFLAAKNLSDAILLSDILTVNDES | |
| | TKAPLSASMIKRYDEHHQDLTLLKALVRQQLPEKYKEIFFDKSKNGYAGYID | |
| | GGASQEEFYKYIKPILEKMDGTEELLEKLNREDFLRKQRTFDNGSIPHQIHL | |
| | GELHAILRRQEEFYPFLKENREKIEKILTFRIPYYVGPLARGNSRFAWMTRK | |
| | SEETITPWNFEEVVDKEASAQAFIERMTNFDKNLPTEKVLPKHSLLYEYFTV | |
| | YNELTKVKYVTEGMGKPEFLSGEQKKEIVDLLFKKNRKVTVKQLKEDYFKKI | |
| | ECLDSVEISGVEDRFNASLGTYHDLLKIIKDKEFLDNEENEDILEDIVLTLT | |
| | LFEDREMIEKRLKKYADLFDDKVLKQLKRRRYTGWGRLSAKLINGIRDKQSG | |
| | KTILDFLKDDGFANRNFMQLIHDDSLTFKEEIQKAQVEGQGDSLHEIIANLA | |
| | GSPAIKKGILQTVKIVDELVKVMGRHKPENIVIEMARENQTTQKGQKNSRER | |
| | LKRLEEVIKELGSQILKEHPVENTQLQNDKLYLYYLQNGKDMYTGEELDIDR | |
| | LSDYDVDHIIPQSFIKDDSIDNRVLTSSEEARGKSDDVPSEEVVKKMKSYWR | |
| | QLLNAKLISQRKFDNLTKAERGGLSELDKAGFIKRQLVETRQITKHVAQILD | |
| | SRFNTKRDENNKLIRDVKIITLKSKLVSDFRKDFQFYKVREINDYHHAHDAY | |
| | LNAVVGTALIKKYPKLESEFVYGDYKVYDSRKLIAKSEQEIGKATAKMFFYS | |
| | NIMNFFKTEIKLADGEIFKRPLIETNEETGEIVWDKEKDFATVRKVLSMPQV | |
| | NIVKKTEVQTGGFSKESILPKRDSDKLIARKKDWDPKKYGGFDSPTVAYSVL | |
| | VVAKIEKGKTKKLKTVKELVGITIMERSSFEKDPVAFLEAKGYQEIQEDLII | |
| | KLPKYSLFELENGRKRLLASAGELQKGNELALPQKYVTLLYLASHYEKLKGK | |
| | PEDEKQHKLYVEQHKSYFDEILDQISEFSERYILADKNLEKILELYKKNEDY | |
| | SISEQAENIINLETLTALGAPAAFKFFDTTIDRKRYTSTKEILDSTLIHQSI | |
| | TGLYETRIDLSQLGGD | |
| CasEnd-230 | MKKPYSIGLDIGTNSVGWAVVTDDYKVPAKKMKVLGNTDKSHIKKNLLGALL | 190 |
| | FDSGNTAEDRRLKRTARRRYTRRRNRILYLQEIFSEEMGKVDDSFFHRLEDS | |
| | FLVPEDKRGERHPIFGNLEEEVKYHENFPTIYHLRKHLADSPEKADLRLVYL | |
| | ALAHIIKFRGHFLIEGKFDTRNNDVQRLFQEFLAVYDNTFENSSLSEQNVQV | |
| | EEILTDKISKSAKKDRVLKLFPNEKSNGRFAEFLKLIVGNQADFKKHFELEE | |
| | KAPLQFSKDTYEEDLEVLLAQIGDEYADLFLSAKKLYDSILLSGILTVTDVS | |
| | TKAPLSASMIKRYNEHQMDLTQLKQFIRQKLPDKYNEVESDVSKDGYAGYID | |
| | GKTNQEDFYKYLKKLLNKIEGSEYFLDKIEREDFLRKQRTFDNGSIPHQIHL | |
| | QEMRAIIRRQAEFYPFLAENQDKIEKILTFRIPYYVGPLARGKSDFAWLSRK | |
| | SDEKITPWNFDEIVDKESSAEAFINRMTNYDLYLPNEKVLPKHSLLYEKFTV | |
| | YNELTKVKYKTEQMGKTAFFDANMKQEIFDGVFKVYRKVTKDKLMDFLEKEF | |
| | DEFRIVDLTGLDKAFNASYGTYHDLLKILKDKDFLDNSKNEKILEDIVLTLT | |
| | LFEDREMIRKRLENYSDLLTKEQLKKLERRHYTGWGRLSAKLINGIRNKESR | |
| | KTILDYLIDDGNSNRNFMQLINDDALSFKEEIAKAQVIGETDNLNQVVSDIA | |
| | GSPAIKKGILQSLKIVDELVKIMGGHQPENIVVEMARENQFTNQGRRNSQQR | |
| | LKGLTDSIKEFGSQILKEHPVENSQLQNDRLFLYYLQNGRDMYTGEELDIDY | |
| | LSQYDIDHIIPQAFIKDDSIDNRVLTSSKEARGKSDDVPSKDVVRKMKSFWS | |
| | KLLSAKLITQRKFDNLTKAERGGLTDDDKAGFIKRQLVETRQITKHVARILD | |
| | ERFNTETDENNKKIRQVKIVTLKSNLVSNFRKEFELYKVREINDYHHAHDAY | |
| | LNAVVGKALLGVYPQLEPEFVYGDYPKFNSHKLVKESTQEENKATAKKFFYS | |
| | NIMNFFKKDDKLADGSIVERPQIERNDENGEIIWKKDKHISNIKKVLSYPQV | |
| | NIVKKVEEQTGGFSKESILPKGNSDKLIPRKTKWDTKKYGGFDSPIVAYSVL | |
| | VIADIEKGKSKKLKTVKELVGITIMEKMTFEKDPVAFLERKGYQNIQEENII | |
| | KLPKYSLFELENGRKRLLASARELQKGNEIVLPNHLGTLLYHAKNIHKVDEK | |
| | NEEIPKHLDYVEKHRDEFKELLDVVSNFSKKYTLAEGNLEKIKELYAQNNQA | |
| | DIKELASSFINLLTFTAIGAPATFKFFDKNIDRKRYTSTTEILNATLIHQSI | |
| | TGLYETRIDLSKLGGD | |
| CasEnd-231 | MDKSYSIGLDIGTNSVGWAVITDEYKVPSKKFKVLGNTDRHSIKKNLIGALL | 191 |
| | FDSGETAEATRLKRTARRRYTRRKNRIRYLQEIFAEEMSKVDDSFFHRLEES | |
| | FLVEEDKRGERHPIFGNIVDEVAYHEKYPTIYHLRKKLADSTEKADLRLIYL | |
| | ALAHIIKFRGHFLIEGDLNSENSDVQKLFIQFVQTYDQTFEESHLSEETVDA | |
| | KAILTEKLSKSRRLENLIKQFPGEKKNGLFGNLIALSLGLTPNFKSNFGLAE | |
| | DAKLQFSKDTYDEDLENLLGQIGDQYADLFVAAKNLYDAILLSGILTVNTEI | |
| | TKAPLSASMIKRYDEHHQDLTLLKKFIREQLPEKYKEIFFDQSKNGYAGYID | |
| | GGASQEEFYKYIKPILSKMDGSEYFLEKIEREDFLRKQRTFDNGSIPHQIHL | |
| | GELHAILRRQEKFYPFLKENQEKIEKILTFRIPYYVGPLARGNSRFAWATRK | |
| | SDETITPWNFEEVVDKEASAQAFIERMTNNDKNLPEEKVLPKHSLLYEKFTV | |
| | YNELTKVKYITEGMRKPAFFSANQKEEIVDLLFKKNRKVTVKKLKEYLFKEF | |
| | ECFRSVEISGVEDRFNASLGTYHDLLKIIKDKDFLDNEENEDILEDIVLTLT | |
| | LFEDREMIEQRLSKYADLFDKKVLKKLKRRRYTGWGRLSAKLINGIRDKQSG | |
| | KTILDFLIDDGFANRNFMQLIHDDSLTFKEEIQKAQVIGQTDSLHEVIANLA | |
| | GSPAIKKGILQSIKIVDELVKVMGRHNPENIVIEMARENQTTQKGQRNSRER | |
| | LKRLEEGIKELGSKILKEHPVDNTQLQNDKLYLYYLQNGKDMYTGEELDIDR | |
| | LSDYDVDHIIPQSFIKDDSIDNRVLTSSAKARGKSDNVPSEEVVKKMKSFWR | |
| | QLLNAKLISQRKFDNLTKAERGGLTELDKAGFIKRQLVETRQITKHVAQILD | |
| | SRFNTKYDENDKLIRDVKIITLKSKLVSQFRKDFQFYKVREINDYHHAHDAY | |
| | LNAVVGTALIKKYPKLESEFVYGDYKVYNSRKMIAKSEQEIGKATAKYFFYS | |
| | NIMNFFKTDVTLANGEIRKRPLIETNEETGEIVWDKEKDFATVRKVLSMPQV | |
| | NIVKKTEVQTGGFSKESILPKRNSDKLIARKKDWDTKKYGGFDSPTVAYSVL | |
| | VVADVEKGKAKKLKTVKELVGITIMERSSFEKNPVAFLEDKGYQNIQKDLII | |
| | KLPKYSLFELENGRKRLLASAGELQKGNELALPQKYVTLLYHAKHYEKLKES | |
| | PEDNEKKKEYVEQHRQEFDEILDQIGEFSERYILADKNLEKIKELYAENEDA | |
| | SIEELASSFINLLTFTALGAPAAFKFFDKTIDRKRYTSTTEILNATLIHQSI | |
| | TGLYETRIDLSQLGGD | |
| CasEnd-232 | MKKKYSIGLDIGTNSVGWAVVTDDYKVPSKKMKVLGNTDRQSIKKNLLGALL | 192 |
| | FDSGETAEATRLKRTARRRYTRRKNRILYLQEIFAEEMNKVDDSFFHRLEES | |
| | FLVEEDKRGERHPIFGNIVEEVAYHEKFPTIYHLRKHLADSTEKADLRLVYL | |
| | ALAHIIKFRGHFLIEGDLNTENTDVQKLFLQFVETYDNLFEESPLGEETVDA | |
| | ESILTAKLSKSRRLENLIKQFPNEKKNGLFGNLIALSLGLQPNFKSNFGLAE | |
| | DAKLQFSKDTYDEDLENLLGQIGDEYADLFAAAKNLYDAILLSGILTVNDES | |
| | TKAPLSASMIKRYEEHHEDLTLLKYFIRNNLPEKYKEIFFDESKNGYAGYID | |
| | GGVKQEEFYKYLKNLLSKLDGSEYFLDKIEREDFLRKQRTFDNGSIPHQIHL | |
| | QELHAILRRQAEYYPFLKENQEKIEKILTFRIPYYVGPLARGNSRFAWMSRK | |
| | SDETITPWNFDEVVDKEASAEAFIERMTNNDLYLPNEKVLPKHSLLYEKFTV | |
| | YNELTKVKYVTEGMGKAQFFSAEQKKEIFDGLFKKNRKVTKKKLKNFLDKEF | |
| | DEFRIVDISGVEDAFNASLGTYHDLLKIIKDKEFLDNEENEDILEDIVLTLT | |
| | LFEDREMIRQRLSKYADLFDKKVLKKLERRHYTGWGRLSAKLINGIRDKQTG | |
| | KTILDYLIDDGFANRNFMQLIHDDSLSFKEEIEKAQVIGDTDSLHEVVANLA | |
| | GSPAIKKGILQSLKIVDELVKVMGRHNPENIVIEMARENQTTAKGQRNSRER | |
| | LKRLEEAIKKLGSNILKEHPVENQQLQNDRLYLYYLQNGKDMYTGEELDIDR | |
| | LSQYDVDHIIPQSFIKDDSIDNRVLTSSKKARGKSDNVPSEEVVRKMKSYWM | |
| | QLLDAKLISQRKFDNLTKAERGGLTEDDKAGFIKRQLVETRQITKHVAQILD | |
| | SRFNTERDENDKLIRKVKIITLKSKLVSDFRKDFGLYKVREINDYHHAHDAY | |
| | LNAVVGKALIKKYPKLEPEFVYGDYPKYNVRKMVRKSDQEIGKATAKRFFYS | |
| | NIMNFFKSEIKLADGRIVERPQIEANEETGEIAWDKEKDFATVRKVLSMPQV | |
| | NIVKKTEVQTGGFSKESILPKRDSDKLIARKKKWDPKKYGGFDSPTVAYSVL | |
| | VVADIEKGKAKKLKTVKELVGITIMERSAFEKNPVAFLENKGYQNIQKDLII | |
| | KLPKYSLFELENGRKRLLASAGELQKGNELALPQKLVTLLYHAKHYEKLKEK | |
| | EEDNEKHMEYVEQHRDEFKEIFDQISEFSERYILADKNLEKISSLYAKNEDA | |
| | SIEELASSFINLLTFTALGAPAAFKFFGTTIDRKRYTSTTEILNATLIHQSI | |
| | TGLYETRIDLSKLGGD | |
| CasEnd-233 | MDKKYSIGLDIGTNSVGWAVVTDEYKVPSKKFKVLGNTDRKSIKKNLLGALL | 193 |
| | FDSGETAEATRLKRTARRRYTRRKNRICYLQEIFSNEMAKVDDNFFQRLEES | |
| | FLVEEDKKNDRHPIFGNIVEEVAYHEKYPTIYHLRKKLADSTEKADLRLVYL | |
| | ALAHIIKFRGHFLIEGDLNSENTDVDKLFIQLVQTYNQLFEENPINASGVDA | |
| | KAILSARLSKSRRLENLIAQLPGEKKNGLFGNLIALSLGLTPNFKSNEDLAE | |
| | DAKLQLSKDTYDDDLDNLLAQIGDQYADLFLAAKNLSDAILLSDILRVNDES | |
| | TKAPLSASMVKRYDEHHQDLTLLKQFVRKQLPEKYKEIFFDQSKNGYAGYID | |
| | GGASQEEFYKYLKKILEKIDGSEEFLDKIEREDFLRKQRTFDNGSIPHQIHL | |
| | QELHAIIRRQEKYYPFLKENKEKIEKILTFRIPYYVGPLARGNSRFAWLSRK | |
| | SDETITPWNFDEVVDKEASAEAFIERMTNFDKNLPDEKVLPKHSLLYEKFTV | |
| | YNELTKVKYVTEGMRKPEFFSAEQKQEIVDLLFKKNRKVTKKQLKEYLVKEF | |
| | DEFDIVEISGVEDRFNASLGTYHDLLKIIKDKDFLDNEENEKILEDIILTLT | |
| | LFEDREMIKKRLEKYADLFDKKQLKKLKRRRYTGWGRLSAKLINGIRDKQTG | |
| | KTILDYLIDDGFANRNFMQLIHDDSLTFKEEIEKAQVIGKSESLHETIANLA | |
| | GSPAIKKGILQSLKIVDELVKVMGRHAPENIVVEMARENQTTQKGQKNSRER | |
| | MKRIEEGIKELGSQILKEHPVENTQLQNEKLYLYYLQNGRDMYVDQELDINR | |
| | LSDYDVDHIVPQSFLKDDSIDNKVLTRSDKARGKSDNVPSEEVVKKMKNYWR | |
| | QLLNAKLITQRKFDNLTKAERGGLSELDKAGFIKRQLVETRQITKHVAQILD | |
| | SRFNTEYDENGKLIRDVKIITLKSKLVSDFRKDFELYKVREINNYHHAHDAY | |
| | LNAVVGTALIKKYPKLESEFVYGDYKVYDVRKMIAKSEKEIGKATAKYFFYS | |
| | NIMNFFKSEVTLANGTIRKRPLIEVNEETGEIVWDKEKDIATVKKVLSMPQV | |
| | NIVKKTEVQTGGFSKESILPKRDSDKLIARKKDWDTKKYGGFDSPTVAYSVL | |
| | VVADVEKGKAKKLKTVKELVGITIMERSAFEKNPIAFLEDKGYKNIQKDNII | |
| | KLPKYSLFELENGRKRLLASAGELQKGNELALPQKYVTLLYHAKHYEKLKGS | |
| | PEDNEKHQYYVEEHKDEFDEILDQIIEFSKRYILADANLEKIKKLYEKNEDA | |
| | SIEELAENFIHLLTFTALGAPAAFKFFGTTIDRKRYTSTKEILNATLIHQSI | |
| | TGLYETRIDLSKLGGD | |
| CasEnd-234 | MDKKYSIGLDIGTNSVGWAVITDEYKVPSKKFKVLGNTDRHSIKKNLIGALL | 194 |
| | FDSGETAEATRLKRTARRRYTRRKNRICYLQEIFSNEMAKVDENFFQRLDDS | |
| | FLYPEDKRNDKYPIFGTLAEEKDYHKQFPTIYHLRKELADNDEKADLRLVYL | |
| | ALAHIIKYRGHFLIEGNLDSENTDIQATFKDFIEVEDRTVENSSLSEETVDV | |
| | ESILTEKISKSRRLEKLLKKFPTEKKNTIFAEFLKLIVGNTADFKKNFGLEE | |
| | DAKLQFSKDTYEEDLEELLGKIGDEYADLFIAAKKLYDAILLSGILTGKDNS | |
| | TKAPLSASMVDRYEEHQKDLKKLKEFIKKNFPDEYNEIFRDKTKNGYAGYIE | |
| | GKTKQDDFYKYLKKLLSKIEGSDYFLDKIEREDFLRKQRTFDNGSIPHQVHL | |
| | QEMKAIIRRQGKYYPFLKENQDKIEKILTFRIPYYVGPLARKKSRFAWAERK | |
| | TDEKITPWNFDDVIDKEKSAEKFITRMTNNDLYLPEEKVLPKHSLLYEKFTV | |
| | YNELTKVKYINEQGKEEKFFDANMKQEIFENVFKKYRKVTKKKLLDYLVKEF | |
| | DELRIVDLTGLDKRFNSSLGTYHDLKKILFDKSFLDDDANQEMIEDIIQTLT | |
| | LFEDKEMIKKRLEKYSDILTKEQLKKLEKRHYTGWGRLSAKLINGIRNKETG | |
| | KTILDYLIDDGYTNRNFMQLIHDDTLSFKDIIAEAQAIKDVDSLHEHIANLA | |
| | GSPAIKKGILQTVKVVDELVKVMGRHKPENIVIEMARENQTTQKGQRRSQQR | |
| | LKKLQESLKELKKDILKEYPTDNQKLQSDRLFLYYIQNGKDMYTGEPLDIDN | |
| | LSQYDIDHIIPQAFIKDDSIDNRVLVSSAEARGKSDDVPSIDIVNKMKSFWK | |
| | RLLEAGLISQRKYDNLTKAERGGLSELDKAGFIKRQLVETRQITKHVAQILD | |
| | SRMNTKYDENDKLIREVKVITLKSKLVSDFRKDFQFYKVREINNYHHAHDAY | |
| | LNAVVGTALIKKYPKLESEFVYGDYKVYDVRKMIAKSEQEIGKATAKYFFYS | |
| | NIMNFFKTEITLANGEIRKRPLIETNGETGEIVWDKGRDFATVRKVLSMPQV | |
| | NIVKKTEVQTGGFSKESILPKRNSDKLIARKKDWDPKKYGGFDSPTVAYSVL | |
| | VVAKVEKGKSKKLKSVKELLGITIMERSSFEKNPIDFLEAKGYKEVKKDLII | |
| | KLPKYSLFELENGRKRMLASAGELQKGNELALPSKYVNFLYLASHYEKLKGS | |
| | PEDNEQKQLFVEQHKHYLDEIIEQISEFSKRVILADANLDKVLSAYNKHRDK | |
| | PIREQAENIIHLFTLTNLGAPAAFKYFDTTIDRKRYTSTKEVLDATLIHQSI | |
| | TGLYETRIDLSQLGGD | |
| CasEnd-235 | MDKKYSIGLDIGTNSVGWAVITDEYKVPSKKFKVLGNTDRQSIKKNLLGALL | 195 |
| | FDSGETAEATRLKRTARRRYTRRKNRIRYLQEIFAEEMSKVDDSFFHRLEES | |
| | FLVEEDKRKERHPIFGNIVEEVAYHEKYPTIYHLRKKLADSTEKADLRLIYL | |
| | ALAHIIKFRGHFLIEGDLNSENSDVQKLFIQLVQTYNQLFEENPISEEGVDA | |
| | KAILSAKLSKSRRLENLIALFPGEKKNGLFGNLIALSLGLTPNFKSNFDLSE | |
| | DAKLQLSKDTYDEDLDNLLAQIGDQYADLFLAAKNLSDAILLSGILTVNDEI | |
| | TKAPLSASMIKRYDEHHQDLTLLKALVRQQLPEKYKEIFFDESKNGYAGYID | |
| | GGASQEDFYKFIKPILEKLDGTEELLAKIEREDLLRKQRTFDNGSIPHQIHL | |
| | NELKAILRRQEEFYPFLKENREKIEKILTFRIPYYVGPLARGNSRFAWMTRK | |
| | SEETITPWNFEEVVDKGASAQAFIERMTNFDKNLPEEKVLPKHSLLYEYFTV | |
| | YNELTKVKYVTEGMRKPEFLSGEQKEAIVDLLFKKNRKVTVKQLKEDYFKKI | |
| | ECFDSVEISGVEDRFNASLGTYHDLLKIIKDKDFLDNEENEDILEDIVLTLT | |
| | LFEDREMIEERLSKYANLFDKKVLKQLKRRRYTGWGRLSRKLINGIRDKQSG | |
| | KTILDFLKDDGFANRNFMQLIHDDSLTFKEEIQKAQVVGQGDSLHEQIANLA | |
| | GSPAIKKGILQSLKIVDELVKVMGRHKPENIVIEMARENQTTQKGQKNSRER | |
| | MKRIEEGIKELGSQILKEHPVENTQLQNEKLYLYYLQNGRDMYVDQELDINR | |
| | LSDYDVDHIVPQSFLKDDSIDNKVLTRSDKARGKSDNVPSEEVVKKMKNYWR | |
| | QLLNAKLITQRKFDNLTKAERGGLSELDKAGFIKRQLVETRQITKHVAQILD | |
| | SRFNTERDENDKLIRRVKIITLKSKLVSDFRKDFQLYKVREINNYHHAHDAY | |
| | LNAVVGTALIKKYPKLESEFVYGDYKVYDVRKMIAKSEQEIGKATAKYFFYS | |
| | NIMNFFKTEITLANGTIRKRPLIETNEETGEIVWDKGKDFATVRKVLSMPQV | |
| | NIVKKTEVQTGGFSKESILPKRNSDKLIARKKDWDTKKYGGFDSPTVAYSVL | |
| | VVAKVEKGKTKKLKTVKELVGITIMERSSFEKDPVAFLEDKGYKDIQEDLII | |
| | KLPKYSLFELENGRKRLLASAGELQKGNELALPQKYVTLLYHAKRYEKLKGK | |
| | PEDREQKLEYVEKHRHEFKEIFDQISEFAERYILADANLEKVLELYSKFEDA | |
| | PIEELAENFIHLFTFTSLGAPAAFKFFDTTIDRKRYTSTKEILNATLIHQSI | |
| | TGLYETRIDLSKLGGD | |
| CasEnd-236 | MDKPYSIGLDIGTNSVGWAVITDEYKVPSKKFKVLGNTDRHSIKKNLLGALL | 196 |
| | FDSGETAEATRLKRTARRRYTRRKNRILYLQEIFSEEMSKVDDSFFHRLEES | |
| | FLVEEDKRGERHPIFGNIVDEVAYHEKYPTIYHLRKELADSTEKADLRLIYL | |
| | ALAHMIKFRGHFLIEGQLNPENTDVQKLFQAFVEVYNRTFEESHLQEETVDV | |
| | EAILTEKVSKSRRLENLIKQFPGEKKNGLFGNLIALSLGLTPNFKSNEDLSE | |
| | DAKLQFSKDTYDEDLENLLGQIGDEYADLFLAAKNLSDAILLSGILTVNTEI | |
| | TKAPLSASMIKRYDEHHQDLTLLKKFVRQQLPEKYKEIFFDKSKNGYAGYID | |
| | GGASQEDFYKYLKPILSKLDGSEYFLDKIEREDFLRKQRTFDNGSIPHQIHL | |
| | QELHAILRRQEVYYPFLKENQEKIEKILTFRIPYYVGPLARGNSRFAWMTRK | |
| | SDETITPWNFEEVVDKEKSAEAFIERMTNNDKNLPEEKVLPKHSLLYEKFTV | |
| | YNELTKVKYVTEGMRKPAFLDSNQKQEIFDLLFKKNRKVTVKKLKEFLFKKF | |
| | EEFDIVEISGVEKRFNASLGTYHDLLKIIKDKDFLDNPENEEILEDIVLTLT | |
| | LFEDREMIEQRLAKYADLFDKKVLKKLKRRRYTGWGRLSAKLINGIRDKQSG | |
| | KTILDYLIDDGFANRNFMQLIHDDSLSFKEEIKKAQVIGKTDSLHEVIAELA | |
| | GSPAIKKGILQSIKIVDELVKVMGRYAPENIVIEMARENQTTQKGQKNSRER | |
| | LKRLEESIKKLGSNILKEHPVDNTQLQNDKLYLYYLQNGKDMYTGEELDINR | |
| | LSDYDVDHIIPQSFIKDDSIDNRVLVSSKKARGKSDNVPSEEVVKKMKSFWY | |
| | QLLKAKLISQRKFDNLTKAERGGLTELDKAGFIKRQLVETRQITKHVAQILD | |
| | SRMNTKYDENDKLIRKVKIITLKSKLVSDFRKEFGFYKVREINDYHHAHDAY | |
| | LNAVVGTALIKKYPKLESEFVYGDYKVYNSRKMIAKSEQEIGKATAKYFFYS | |
| | NIMNFFKTDITLANGEIRKRPLIETNKETGEIVWDKEKDFATVKKVLSMPQV | |
| | NIVKKTEVQTGGFSKESILPKRNSDKLIARKKDWDTKKYGGFDSPTVAYSVL | |
| | VVADIEKGKAKKLKTVKELVGITIMERSAFEKNPIVFLENKGYKNIQKDLII | |
| | KLPKYSLFELENGRKRLLASAGELQKGNELALPNKYVTLLYLAKHYEKLKGS | |
| | PEDNEKHLEYVEQHLSEFDEILNQISEFAKRYILADANLEKIQELYTQNEDA | |
| | SIEELAESFINLLTFTALGAPAAFKFFGKTIDRKRYTSTKEILNSTLIHQSI | |
| | TGLYETRIDLSQLGGD | |
| CasEnd-237 | MDKKYSIGLDIGTNSVGWAVITDEYKVPSKKFKVLGNTDRHSIKKNLLGALL | 197 |
| | FDSGETAEATRLKRTARRRYTRRKNRILYLQEIFAEEMNKVDDSFFHRLEES | |
| | FLVEEDKRGERHPIFGNIVEEVAYHEKYPTIYHLRKHLADSTEKADLRLVYL | |
| | ALAHIIKFRGHFLIEGDLNAENTDVQKLFIDFVETYDRTFEESHLSEITVDA | |
| | SEILTDKISKSRKLENLIKLFPNEKKNGLFGNLIALILGNQPNFKINFELSE | |
| | DAKLQFSKDTYEEDLENLLGQIGDEYADLFVAAKNLYDAILLSGILTVNTEI | |
| | TKAPLSASMIKRYDEHHQDLTLLKAFIRKNLPEKYKEIFFDESKNGYAGYID | |
| | GGASQEEFYKYIKPLLSKIEGSEYFLDKIEREDFLRKQRTFDNGSIPHQIHL | |
| | QELHAILRRQEEYYPFLKENQEKIEKILTFRIPYYVGPLARGNSRFAWASRK | |
| | SDETITPWNFDEVVDKEKSAEAFIERMTNNDKNLPEEKVLPKHSLLYEKFTV | |
| | YNELTKVKYVTEGMRKPAFFDANLKQEIFDLLFKENRKVTKKKLLDFLDKEF | |
| | DEFRIVDISGVEKSFNASLGTYHDLLKIIKDKEFLDNPENEEILEDIVLTLT | |
| | LFEDREMIKQRLSKYADLFDKKQLKKLKRRRYTGWGRLSAKLINGIRDKQSG | |
| | KTILDYLIDDGFANRNFMQLIHDDSLSFKEEIAKAQVIGESDSLHQVIADLA | |
| | GSPAIKKGILQSIKIVDELVKVMGRYNPENIVIEMARENQTTQKGQRNSRER | |
| | LKRLEESLKELGSKILKEHPVDNTQLQNDKLYLYYLQNGRDMYTGEELDIDR | |
| | LSDYDVDHIIPQSFIKDDSIDNRVLTSSAKARGKSDDVPSEEVVKKMKSFWK | |
| | KLLDAKLISQRKFDNLTKAERGGLTELDKAGFIKRQLVETRQITKHVAQILD | |
| | SRFNTKYDENDKLIRDVKIITLKSKLVSQFRKEFELYKVREINDYHHAHDAY | |
| | LNAVVGKALIKKYPKLESEFVYGDYPVYNSYKMIAKSEQEIGKATAKYFFYS | |
| | NIMNFFKTDITLANGEIRKRPLIETNEETGEIAWDKEKHIATVKKVLSMPQV | |
| | NIVKKTEVQTGGFSKESILPKRNSDKLIARKKDWDTKKYGGFDSPTVAYSVL | |
| | VIADIEKGKAKKLKTVKELVGITIMERSSFEKNPIAFLEDKGYQNIQKDNII | |
| | KLPKYSLFELENGRKRLLASAGELQKGNELALPNHYVTLLYHAKHYEKLKES | |
| | PEDNPKHLNYVEEHRSEFDELLDQISEFSKRYILADKNLEKIKELYAKNKDA | |
| | DIEELASSFINLLTFTALGAPAAFKFFGKDIDRKRYTSTTEILNATLIHQSI | |
| | TGLYETRIDLSQLGGD | |
| CasEnd-238 | MDKKYSIGLDIGTNSVGWAVITDEYKVPSKKFKVLGNTDRHSIKKNLIGALL | 198 |
| | FDSGETAEATRLKRTARRRYTRRKNRICYLQEIFSNEMAKVDDSFFHRLEES | |
| | FLVEEDKKHERHPIFGNIVDEVAYHEKYPTIYHLRKKLVDSTDKADLRLIYL | |
| | ALAHMIKFRGHFLIEGDLNPDNSDVDKLFIQLVQTYNQLFEENPINASGVDA | |
| | KAILSARLSKSRRLENLIAQLPGEKKNGLFGNLIALSLGLTPNFKSNEDLAE | |
| | DAKLQLSKDTYDDDLDNLLAQIGDQYADLFLAAKNLSDAILLSDILRVNTEI | |
| | TKAPLSASMIKRYDEHHQDLTLLKELVRKQLPEKYKEIFFDQSKNGYAGYID | |
| | GGASQEDFYKYIKKILEKMDGTEELLAKLEREDLLRKQRTFDNGSIPHQIHL | |
| | GELHAILRRQEEYYPFLKDNREKIEKILTFRIPYYVGPLARGNSRFAWMKRK | |
| | SEETITPWNFDEVVDKGASAQAFIERMTNFDKNLPNEKVLPKHSLLYEYFTV | |
| | YNELTKVKYVTEGMRKPEFLDGEQKKEIVDNLFKKNRKVTVKQLKEYYFKKE | |
| | DCFDSVEISGVEDRFNASLGTYHDLLKIIKDKAFLDNEENEEILEDIVLTLT | |
| | LFEDREMIKERLEKYADLFDDKVMKQLKRRRYTGWGRLSRKLINGIRDKQSG | |
| | KTILDFLIDDGFTNRNFMQLIHDDSLTFKEEIEKAQVSGQGDSLHEHIANLA | |
| | GSPAIKKGILQTVKVVDELVKVMGRHKPENIVIEMARENQTTQKGQKNSRER | |
| | MKRIEEGIKELGSQILKEHPVENTQLQNEKLYLYYLQNGRDMYVDQELDINR | |
| | LSDYDVDHIVPQSFLKDDSIDNKVLTRSDKARGKSDNVPSEEVVKKMKNYWR | |
| | QLLNAKLITQRKFDNLTKAERGGLSELDKAGFIKRQLVETRQITKHVAQILD | |
| | SRMNTKYDENDKLIREVKVITLKSKLVSDFRKDFQFYKVREINNYHHAHDAY | |
| | LNAVVGTALIKKYPKLESEFVYGDYKVYDVRKMIAKSEQEIGKATAKYFFYS | |
| | NIMNFFKTEITLANGEIRKRPLIETNGETGEIVWDKGRDFATVRKVLSMPQV | |
| | NIVKKTEVQTGGFSKESILPKRDSDKLIARKKDWDPKKYGGFDSPTVAYSVL | |
| | VVAKIEKGKTKKLKTVKELLGITIMERSAFEKNPIAFLENKGYQNVKKDLII | |
| | KLPKYSLFELENGRKRMLASAGELQKGNELALPSKYVNFLYLASNYEKLKGS | |
| | PEDNKRKQLFVEQHKDYLDEIIDQISEFSKRVILADANLEKVKKAYEKHKNK | |
| | SIEEQAENIIHLFTLTALGAPAAFKYFDKDIDRKRYTSTKEVLNATLIHQSI | |
| | TGLYETRIDLSQLGGD | |
| CasEnd-239 | MDKKYSIGLDIGTNSVGWAVVTDEYKVPSKKFKVLGNTDRKSIKKNLIGALL | 199 |
| | FDSGETAEATRLKRTARRRYTRRKNRIRYLQEIFAEEMAKVDDSFFHRLEES | |
| | FLVEEDKKNERHPIFGNIVDEVAYHEKYPTIYHLRKHLADSTEKADLRLIYL | |
| | ALAHIIKFRGHFLIEGDLNSENSDVQKLFEQLVQTYNQLFEESPLDEEEVDA | |
| | EAILTEKLSKSRRLENLIALFPGEKKNGLFGNLIALSLGLTPNFKSNFDLSE | |
| | DAKLQFSKDTYDEDLEELLGQIGDEYADLFVAAKNLYDAILLSGILTVNDES | |
| | TKAPLSASMVKRYDEHHQDLTLLKQFIRKQLPEKYKEIFFDQSKNGYAGYID | |
| | GGASQEEFYKYLKKILEKIDGSEEFLDKIEREDFLRKQRTFDNGSIPHQIHL | |
| | QELHAILRRQEKYYPFLKENQEKIEKILTFRIPYYVGPLARGNSRFAWMSRK | |
| | SDETITPWNFEEVVDKEKSAEKFIERMTNFDKNLPNEKVLPKHSLLYEKFTV | |
| | YNELTKVKYVTEGMKKPEFFDANQKQEIVDLLFKKNRKVTKKQLKEYLFKEF | |
| | DEFDIVEISGVEDRFNASLGTYHDLLKIIDDKDELDNEENEDILEDIILTLT | |
| | LFEDREMIKKRLKKYADLFDKKQLKKLKRRRYTGWGRLSAKLINGIRDKQTG | |
| | KTILDYLIDDGFANRNFMQLIHDDSLTFKEEIEKAQVIGDGESLHEVIANLA | |
| | GSPAIKKGILQSLKIVDELVKVMGRHEPENIVIEMARENQTTQKGQKNSRER | |
| | MKRLEEAIKELGSKILKEHPVENTQLQNDKLYLYYLQNGKDMYTGEELDIDR | |
| | LSDYDVDHIVPQSFLKDDSIDNKVLVSSAKARGKSDDVPSEEIVKKMKSYWK | |
| | KLLDAKLITQRKFDNLTKAERGGLTELDKAGFIKRQLVETRQITKHVAQILD | |
| | SRFNTKYDENDKLIRDVKIITLKSKLVSQFRKDFGLYKVREINNYHHAHDAY | |
| | LNAVVGTALIKKYPKLESEFVYGDYKVYDVRKMIAKSEKEIGKATAKYFFYS | |
| | NIMNFFKTEVKLANGEIRKRPLIEVNEETGEIVWDKEKDFATVRKVLSMPQV | |
| | NIVKKTEVQTGGFSKESILPKRDSDKLIARKKDWDTKKYGGFDSPTVAYSVL | |
| | VVAKIEKGKAKKLKTVKELVGITIMERSAFEKNPVAFLEAKGYQEVQKDLII | |
| | KLPKYSLFELENGRKRLLASAGELQKGNELALPQKYVILLYHAKHYEKLKGS | |
| | PEDNEEKLLYVEQHKEYFDEIIEQISEFAKRYILADANLEKIKELYEKNRDA | |
| | DIEELAESFINLLTFTALGAPAAFKFFDTTIDRKRYTSTKEILNATLIHQSI | |
| | TGLYETRIDLSKLGGD | |
| CasEnd-240 | MKKPYSIGLDIGTNSVGWAVVTDDYKVPAKKMKVLGNTDKSHIKKNLLGALL | 200 |
| | FDSGNTAEGRRLKRTARRRYTRRRNRILYLQEIFSEEMNKVDESFFHRLDDS | |
| | FLVPEDKRGERHPIFGDLAEETKYHKEFPTIYHLRKHLADSPEKADLRLVYL | |
| | ALAHIIKYRGHFLIEGDLDTRNNDVQQLFQEFLAIYDNTFERSSLQEQNAQA | |
| | EEILTDKISKSAKKERVLKLFPNEKSNGFFAEFLKLIVGNQADFKKNFELEE | |
| | KAPLQFSKDSYEEDLETLLGQIGDEYADLFVAAKKLYDSILLSGILTVTDVS | |
| | TKAPLSASMIQRYEEHNMDLAKLKDFIRKNLSHKYKEVENDESKDGYAGYID | |
| | GKTTQEAFYKYLKKLLSKTEGSGYFLDKIEREDFLRKQRTFDNGSIPHQIHL | |
| | QEMRAIIRRQAEFYPFLAENQEKIEQILTFRIPYYVGPLARGESDFAWASRK | |
| | SDEKITPWNEDDIIDKESSAEAFINRMTNYDLYLPEEKVLPKHSLLYEKFTV | |
| | YNELTKVKYITEQMGKTQFFDANLKQEIFDGVFKVERKVTKKKLMDFLHHEF | |
| | DEFRIVDLTGIDKAFNASLGTYHDLLKILNDKEFLDDSENEAILEDIVLTLT | |
| | LFEDREMIKQRLSKYSDLFTKEQLKKLERRHYTGWGRLSAKLINGIRDKHTR | |
| | KTILDYLIDDGRSNRNFMQLINDDALSFKEEIAKAQVIGETDNLKQVVQDLA | |
| | GSPAIKKGILQSLKIVDELVKIMGGYNPENIVVEMARENQFTNRGRRNSQQR | |
| | LKGLTDSIKELGSKILKEHPVDNSQLQNDRLFLYYLQNGKDMYTGEALDIDY | |
| | LSQYDIDHIIPQAFIKDDSLDNRVLVSSAKARGKSDDVPSKEVVQKMKSFWS | |
| | KLLDSKLISQRKFDNLTKAERGGLIDDDKAGFIKRQLVETRQITKHVARILD | |
| | ERFNTETDENNKKIRSVKIVILKSNLVSNFRKEFEFYKVREINDYHHAHDAY | |
| | LNAVVAKALLKKYPKLEPEFVYGEYPKYNSYRIVVENVKERKSATAKMFFYS | |
| | NIMNFFKKTIKLADGTVVERPMIEVNEETGEIVWDKTKHISTVKKVLSYPQV | |
| | NIVKKVEEQTGGFSKESILPKGDSDKLIPRKTKWDTKKYGGFDSPIVAYSVL | |
| | VIADIEKGKAKKLKTVKELVGITIMERATFEKDPVAFLERKGYQNIQKENII | |
| | KLPKYSLFELENGRRRLLASAKELQKGNEMVLPNHLVILLYHAKHIHKVDEK | |
| | SEDAPKHLQYVDKHRSEFKELLDVVSNFSKKYILAEKNLEKIDELFDQNNGA | |
| | SVEELASSFINLLTFTAIGAPATFKFFGKNIDRKRYTSTTEILNATLIHQSI | |
| | TGLYETRIDLSKLGED | |
| CasEnd-241 | MDKKYSIGLDIGTNSVGWAVITDEYKVPSKKFKVLGNTDRHSIKKNLIGALL | 201 |
| | FDSGETAEATRLKRTARRRYTRRKNRICYLQEIFSNEMAKVDENFFQRLDDS | |
| | FYVPEDKRGDKYPIFGTLKEEKDYHKEFPTIYHLRKHLADSDEKADLRLVYL | |
| | ALAHIIKYRGHFLIEGELDSRNTDIQKTFKDFLEIFDRTFEESHLQEELIDV | |
| | ESILTEKISKSRRVEKLLKKFPNQKKNTIFAEFLKLIVGNTADFKKVENLEE | |
| | DAKLQFSKETYDEDLEELLGEIGDEYADLFSSAKKLYDAILLSGILTGKDNS | |
| | TKAPLSASMVQRYEEHKEDLKKLKKFIKKNAPEKYNEIFKDKAKNGYAGYIE | |
| | NKTKQEDFYKYLKKLLTKVEGSDYFLDKIEREDFLRKQRTFDNGVIPHQVHL | |
| | QELKAIIRNQEKYYPFLKENQDKIEKILTFRIPYYVGPLARKKSRFAWAERK | |
| | SDEKITPWNFDDVIDKEKSAEKFITRMTNNDLYLPEEKVLPKHSLLYEKFTV | |
| | YNELTKVRYINEQGKEEKFFDANLKQEIFNDVFKKERKVTKKKLLDYLEKEF | |
| | DELRIVDITGLDKRFNSSLGTYHDLKKILFDKSFLDDPDNQEMIEEIIQTLT | |
| | LFEDKKMIKKRLEKYSDILTKSQIKKLEKRHYTGWGRLSAKLINGIRDKETG | |
| | KTIMDYLIDDGYTNRNFMQLIHDDNLSFKDIISEAQIIKDEDSLHEHIANLA | |
| | GSPAIKKGILQTVKVVDELVKVMGRHKPENIVIEMARENQTTQKGQRRSQQR | |
| | LKLLQDSVKNLASKILKEYPTDNQKLQSDRLFLYYLQNGKDMYTGEPLDIDN | |
| | LSQYDIDHIIPQAFIKDDSIDNRVLVSSAEARGKSDDVPSIEIVNKMKGFWK | |
| | KLLDAGLISKRKYDNLTKAERGGLSELDKAGFIKRQLVETRQITKHVAQILD | |
| | SRMNTKYDENDKLIREVKVITLKSKLVSDFRKDFQFYKVREINNYHHAHDAY | |
| | LNAVVGTALIKKYPKLESEFVYGDYKVYDVRKMIAKSEQEIGKATAKYFFYS | |
| | NIMNFFKTEITLANGEIRKRPLIETNGETGEIVWDKGRDFATVRKVLSMPQV | |
| | NIVKKTEVQTGGFSKESILPKRNSDKLIARKKDWDPKKYGGFDSPTVAYSVL | |
| | VVAKVEKGKSKKLKSVKELLGITIMERSSFEKNPIDFLEAKGYKEVKKDLII | |
| | KLPKYSLFELENGRKRMLASAGELQKGNELALPSKYVNFLYLASHYEKLKGS | |
| | PEDNEQKQLFVEQHKHYLDEIIEQISEFSKRVILADANLDKVLSAYNKHRDK | |
| | PIREQAENIIHLFTLTNLGAPAAFKYFDTTIDRKRYTSTKEVLDATLIHQSI | |
| | TGLYETRIDLSQLGGD | |
| CasEnd-242 | MDKPYSIGLDIGTNSVGWAVITDEYKVPSKKFKVLGNTDRHSIKKNLIGALL | 202 |
| | FDSGETAEATRLKRTARRRYTRRKNRICYLQEIFAEEMNKVDDSFFHRLEES | |
| | FLVEEDKRYERHPIFGNIVDEVAYHEKYPTIYHLRKELADSDEKADLRLIYL | |
| | ALAHIIKFRGHFLIEGDLSSENTDVQKLFLQFVQTYNQLFEESNLNEETVDA | |
| | EAILTAKMSKSRRLENLIAQFPAEKKNGLFGNLVALSLGLTPNFKSNFELTE | |
| | DAKLQFSKDTYDEDLENLLAQIGDQYADLFLAAKNLYDAILLSGILTVNTEI | |
| | TKAPLSASMIKRYDEHHQDLTLLKVFVRDQLPEKYKEIFFDDTKNGYAGYID | |
| | GGASQEEFYKYIKPILIKIDGSEELLEKIEREDFLRKQRTFDNGSIPHQIHL | |
| | QELHAILRRQGKYYPFLKENQEKIEKILTFRIPYYVGPLARGNSRFAWMTRK | |
| | SNETITPWNFEEVVDKEASAQAFIERMTNFDKNLPCEKVLPKHSLLYEKFTV | |
| | YNELTKVKYITEGMRKPAFLSSNQKKEIVDLLFKKNRKVTVKQLKEFLTKKI | |
| | ECFDSVEISGVEDKFNASLGTYHDLLKIIKDKDFLDNEENEDILEDIVLTLT | |
| | LFEDREMIEKRLSKYADLFDKKVLKKLKRRRYTGWGRLSAKLINGIRDKQSG | |
| | KTILDYLIDDGFANRNFMQLIHDDSLTFKEEIAKAQVIGNSDSLHETIANLA | |
| | GSPAIKKGILQSIKIVDELVKVMGRHNPENIVIEMARENQTTQKGQKNSRER | |
| | LKRLEEAIKELGSQILKEHPVDNTQLQNDKLYLYYLQNGKDMYTGEELDIDR | |
| | LSDYDVDHIIPQSFIKDDSIDNRVLVSSAKARGKSDNVPSEEVVKKMKNEWS | |
| | KLLNAKLISQRKFDNLTKAERGGLSELDKAGFIKRQLVETRQITKHVAQILD | |
| | SRFNTKYDENDKLIRKVKIITLKSKLVSDFRKDFGLYKVREINNYHHAHDAY | |
| | LNAVVGKALIKKYPKLESEFVYGDYPVYNSAKMIAKSEQEIGKATAKYFFYS | |
| | NIMNFFKTEITLANGEIRKRPLIETNEETGEIVWDKEKHFATVRKVLSMPQV | |
| | NIVKKTEVQTGGFSKESILPKRDSDKLIARKKDWDTKKYGGFDSPTVAYSVL | |
| | VIADIEKGKTKKLKTVKELVGITIMERSAFEKDPIAFLEDKGYQNIQKEKII | |
| | KLPKYSLFELENGRKRLLASAGELQKGNELALPGKYVTLLYHAKHYEKLKES | |
| | PEDNEKHKYYVEQHRDEFDEILEQISEFSERYILADSNLEKIRELYDKNSNK | |
| | SISELAESFINLLTFTAFGAPAAFKFFGQTIDRKRYTSTTEILNATLIHQSI | |
| | TGLYETRIDLSQLGGD | |
| CasEnd-243 | MKKPYSIGLDIGTNSVGWAVVTDDYKVPAKKMKVLGNTDKSHIKKNLLGALL | 203 |
| | FDSGNTAEDRRLKRTARRRYTRRRNRILYLQEIFSEEMGKVDDSFFHRLEDS | |
| | FLVPEDKRGERHPIFGNLEEEVKYHENFPTIYHLRKYLADSPEKADLRLVYL | |
| | ALAHIIKFRGHFLIEGKLDTRNNDVQRLFQEFLEVYDNTFERSSLQEQNVQV | |
| | EEILTDKISKSAKKDRILKLFPNEKSNGRFAEFLKLIVGNQADFKKHFELEE | |
| | KAPLQFSKDTYEEDLENLLAQIGDEYADLFLSAKKLYDSILLSGILTVTDVS | |
| | TKAPLSASMIQRYKEHQMDLTQLKQFIRQKLSDKYNEVESDVSKDGYAGYID | |
| | GKTTQEAFYKYLKGLLNKIEGSEYFLDKIEREDFLRKQRTFDNGSIPHQIHL | |
| | QEMRAIIRRQAEFYPFLAENQDKIEKILTFRIPYYVGPLARGKSDFAWLSRK | |
| | SAEKITPWNFDEIVDKESSAEAFINRMTNYDLYLPNEKVLPKHSLLYEKFTV | |
| | YNELTKVKYKTEQMGKTAFFDANMKQEIFDGVFKVYRKVTKDKLMDFLEKEF | |
| | DEFRIVDLTGLDKAFNASLGTYHDLRKILNDKDFLDNSKNEKILEDIVLTLT | |
| | LFEDREMIRKRLENYSDLLTKEQLKKLERRHYTGWGRLSAKLINGIRNKESR | |
| | KTILDYLIDDGNSNRNFMQLINDDALSFKEEIAKAQVIGETDNLNQVVSDLA | |
| | GSPAIKKGILQSLKIVDELVKIMGNHNPENIVVEMARENQFTNQGRRNSQQR | |
| | LKGLTDSIKEFGSQILKEHPVENSQLQNDRLFLYYLQNGRDMYTGEELDIDY | |
| | LSQYDIDHIIPQAFIKDDSIDNRVLVSSAEARGKSDDVPSKDVVRKMKSYWS | |
| | KLLSAKLITQRKFDNLTKAERGGLTDDDKAGFIKRQLVETRQITKHVARILD | |
| | ERFNTETDENNKKIRQVKIVTLKSNLVSNFRKEFELYKVREINDYHHAHDAY | |
| | LNAVVGKALLKKYPKLEPEFVYGEYPKFNSYKFVAKTKEEENKATAKMFFYS | |
| | NIMNFFKKDVKLADGSIVERPVVEVNDETGEIIWDKDKHISTIKKVLSYPQV | |
| | NIVKKVEEQTGGFSKESILPKGNSDKLIPRKTKWDTKKYGGFDSPIVAYSVL | |
| | VIADIEKGKSKKLKTVKELVGITIMEKMTFEKDPVAFLERKGYQNIQEENII | |
| | KLPKYSLFELENGRKRLLASAKELQKGNEIVLPNHLVTLLYHAKNIHKVDEK | |
| | EEEIPKHLEYVDKHKDEFKELLDVVSNFSKKYTLAEKNLEKIKELYAQNNSA | |
| | DIKELASSFINLLTFTAIGAPATFKFFDKNIDRKRYTSTTEILNATLIHQSI | |
| | TGLYETRIDLSKLGGD | |
| CasEnd-244 | MKKPYSIGLDIGTNSVGWAVVTDDYKVPSKKMKVLGNTDRQSIKKNLLGALL | 204 |
| | FDSGETAEATRLKRTARRRYTRRKNRICYLQEIFSNEMAKVDDSFFHRLEES | |
| | FLVEEDKKHERHPIFGNIVDEVAYHEKYPTIYHLRKKLVDSTDKADLRLIYL | |
| | ALAHMIKFRGHFLIEGDLNPDNSDVDKLFIQLVQTYNQLFEENPINASGVDA | |
| | KAILSARLSKSRRLENLIAQLPGEKKNGLFGNLIALSLGLTPNFKSNEDLAE | |
| | DAKLQLSKDTYDDDLDNLLAQIGDQYADLFLAAKNLSDAILLSDILRVNTEI | |
| | TKAPLSASMIKRYDEHHQDLTLLKALVRQQLPEKYKEIFFDQSKNGYAGYID | |
| | GGASQEEFYKFIKPILEKMDGTEELLVKLNREDLLRKQRTFDNGSIPHQIHL | |
| | GELHAILRRQEDFYPFLKDNREKIEKILTFRIPYYVGPLARGNSRFAWMTRK | |
| | SEETITPWNFEEVVDKGASAQSFIERMTNFDKNLPNEKVLPKHSLLYEYFTV | |
| | YNELTKVKYVTEGMRKPAFLSGEQKKAIVDLLFKTNRKVTVKQLKEDYFKKI | |
| | ECFDSVEISGVEDRFNASLGTYHDLLKIIKDKDFLDNEENEDILEDIVLTLT | |
| | LFEDREMIEERLKTYAHLFDDKVMKQLKRRRYTGWGRLSRKLINGIRDKQSG | |
| | KTILDFLKSDGFANRNFMQLIHDDSLTFKEDIQKAQVSGQGESLHEQVADLA | |
| | GSPAIKKGILQSLKIVDEIVKVMGRYAPQNIVVEMARENQTTAKGQRNSRER | |
| | LKRLEEALKKLGSKILKEHPVENSQLQSDRLYLYYLQNGKDMYTGEELDIDR | |
| | LSQYDVDHIIPQSFIKDDSIDNRVLTSSKEARGKSDDVPSEDVVRKMKPYWS | |
| | KLLRSNLISQRKFDNLTKAERGGLTQDDKAGFIKRQLVETRQITKHVAQILD | |
| | SRFNKEFDDNNKLIREVKIVTLKSKLVSQFRKEFGLYKVREINDYHHAHDAY | |
| | LNAVVGKALIKKYPKLEPEFVYGDYPKYNSHKLIGKSDKERGKATAKMFFYS | |
| | NIMNFFKSDVKLADGTIFERPPIEVNEETGEIVWDKTKHIATVKKVLSMPQV | |
| | NIVKKTEVQTGGFSKESILPKRESDKLIARKKGWDTSKYGGEDSPTVAYSIL | |
| | VIAKVEKGKAKKLKTVKELVGITIMEQSAFEKDPVKFLEDKGYQDIQEHLII | |
| | KLPKYSLFELENGRKRLLASAGELQKANELALPQKLVILLYHAKNIESSSEK | |
| | SEDESHHRYYVSNHYKEFDEIFDQIVEFSERYILADKNIEKIRELFDQNESL | |
| | SISELAQSFINLFTFTALGAPADFKFLNKDIDRKRYTSPSEILNSTLIHQSI | |
| | TGLYETRIDLSKLGGD | |
| CasEnd-245 | MKKPYSIGLDIGTNSVGWAVVTDDYKVPAKKMKVLGNTDKSHIKKNLLGALL | 205 |
| | FDSGNTAEDRRLKRTARRRYTRRRNRILYLQEIFSEEMGKVDDSFFHRLEDS | |
| | FLVPEDKRGERHPIFGNLEEEVKYHENFPTIYHLRKYLADNPEKADLRLVYL | |
| | ALAHIIKFRGHFLIEGKFDTRNNDVQRLFQEFLAVYDNTFENSSLQEQNVQV | |
| | EEILTDKISKSAKKDRVLKLFPNEKSNGRFAEFLKLIVGNQADFKKHFELEE | |
| | KAPLQFSKDTYEEDLEVLLAQIGDEYAELFLSAKKLYDSILLSGILTVTDVS | |
| | TKAPLSASMIQRYNEHQMDLTQLKQFIRQKLSDKYNEVESDVSKNGYAGYID | |
| | GKTNQEDFYKYLKKLLNKIEGSGYFLDKIEREDFLRKQRTFDNGSIPHQIHL | |
| | QEMRAIIRRQAEFYPFLAENQDKIEKILTFRIPYYVGPLARGKSDFAWLSRK | |
| | SADKITPWNFDEIVDKESSAEAFINRMTNYDLYLPNQKVLPKHSLLYEKFTV | |
| | YNELTKVKYKTEQMGKTAFFDANMKQEIFDGVFKVYRKVTKDKLMDFLEKEF | |
| | DEFRIVDLTGLDKAFNASYGTYHDLRKILKDKDFLDNSKNEKILEDIVLTLT | |
| | LFEDREMIRKRLENYSDLLTKEQLKKLERRHYTGWGRLSAKLIHGIRNKESR | |
| | KTILDYLIDDGNSNRNFMQLINDDALSFKEEIAKAQVIGETDNLNQVVSDIA | |
| | GSPAIKKGILQSLKIVDELVKIMGTHQPENIVVEMARENQFTNQGRRNSQQR | |
| | LKGLTDSIKEFGSQILKEHPVENSQLQNDRLFLYYLQNGRDMYTGEELDIDY | |
| | LSQYDIDHIIPQAFIKDNSIDNRVLVSSKEARGKSDDVPSKEVVRKMKSYWS | |
| | KLLSAKLITQRKFDNLTKAERGGLTDDDKAGFIKRQLVETRQITKHVARILD | |
| | ERFNTETDENNKKIRQVKIVTLKSNLVSNFRKEFELYKVREINDYHHAHDAY | |
| | LNAVVGKALLGKYPQLEPEFVYGEYPKFNSHKLVAKSKSEENKATAKKFFYS | |
| | NIMNFFKKDVKLADGSIIERPMIERNDETGEIIWDKDKHISTVKKVLSYPQV | |
| | NIVKKVEEQTGGFSKESILPKGNSDKLIPRKTKWDTKKYGGFDSPIVAYSVL | |
| | VIADIEKGKSKKLKTVKALVGITIMEKMTFERNPVAFLERKGYRNIQEENII | |
| | KLPKYSLFELENGRKRLLASARELQKGNEIVLPNHLGTLLYHAKNIHKVDEK | |
| | EEDIPKHLDYVDKHKDEFKELLDVVSNFSKKYTLAEKNLEKIKELYAQNNGA | |
| | DIKELASSFINLLTFTALGAPATFKFFDKNIDRKRYTSTTEILNATLIHQSI | |
| | TGLYETRIDLSKLGGD | |
| CasEnd-246 | MKKKYSIGLDIGTNSVGWAVITDEYKVPSKKFKVLGNTDRQSIKKNLLGALL | 206 |
| | FDSGETAEATRLKRTARRRYTRRKNRILYLQEIFSEEMAKVDDSFFHRLEES | |
| | FLVEEDKRGERHPIFGNIVDEVAYHEKYPTIYHLRKKLADSTEKADLRLIYL | |
| | ALAHIIKFRGHFLIEGDLNSENSDVQKLFIQLVQTYNQLFEENHINEEGVDA | |
| | SAILSARLSKSRRLENLIAQFPGEKKNGLFGNLIALSLGLTPNFKSNEDLAE | |
| | DAKLQLSKDTYDEDLDNLLAQIGDQYADLFSAAKNLSDAILLSGILTVNDEK | |
| | TKAPLSASMIKRYDEHHQDLTLLKALVRQQLPEKYKEIFFDQSKNGYAGYID | |
| | GGASQEEFYKFIKPILEKMDGTEEFLDKINREDFLRKQRTFDNGSIPHQIHL | |
| | GELHAILRRQEDFYPFLKENREKIEKILTFRIPYYVGPLARGNSRFAWMTRK | |
| | SEETITPWNFEEVVDKEASAQSFIERMTNFDKNLPNEKVLPKHSLLYEYFTV | |
| | YNELTKVKYVTEGMGKPEFLSAEQKEEIVDLLFKKNRKVTVKKLKEDLFKKI | |
| | ECFDSVEISGVEDRFNASLGTYHDLLKIIKDKDFLDNEENEDILEDIVLTLT | |
| | LFEDREMIEERLEKYADLFDKKVLKQLKRRRYTGWGRLSAKLINGIRDKQSG | |
| | KTILDFLKDDGFANRNFMQLIHDDSLTFKEEIQKAQVSGQTDSLHEVIANLA | |
| | GSPAIKKGILQSIKIVDELVKVMGRHKPENIVIEMARENQTTQKGQKNSRER | |
| | MKRIEEGIKELGSQILKEHPVENTQLQNEKLYLYYLQNGRDMYVDQELDINR | |
| | LSDYDVDHIVPQSFLKDDSIDNKVLTRSDKARGKSDNVPSEEVVKKMKNYWR | |
| | QLLNAKLITQRKFDNLTKAERGGLSELDKAGFIKRQLVETRQITKHVAQILD | |
| | SRFNTETDENDKLIREVKIITLKSKLVSDFRKDFGFYKVREINHYHHAHDAY | |
| | LNAVVGTALIKKYPKLESEFVYGDYKVYDVRKMIAKSEQEIGKATAKYFFYS | |
| | NIMNFFKSEITLANGEIRKRPQIETNEETGEIVWDKEKDFATVKKVLSMPQV | |
| | NIVKKTEVQTGGFSKESILPKRNSDKLIARKKDWDTKKYGGFDSPTVAYSVL | |
| | VVAKVEKGKSKKLKPVKELVGITIMERSSFEKDPIAFLESKGYKDIQKDKII | |
| | KLPKYSLFELENGRKRLLASAGELQKGNELALPNKYVILLYHASHYEKLKES | |
| | EEDNKEHQEYVEQHRDYFDEIFEQISEFSERYILADKNLEKIEELYKENEDK | |
| | DISELAENFIHLFTFTALGAPAAFKFFDATIDRKRYTSTTEILNATLIHQSI | |
| | TGLYETRIDLSQLGGD | |
| CasEnd-247 | MDKPYSIGLDIGTNSVGWAVVTDEYKVPSKKFKVLGNTDRHSIKKNLLGALL | 207 |
| | FDSGETAEATRLKRTARRRYTRRKNRILYLQEIFAEEMNKVDPSFFHRLEES | |
| | FLVEEDKRGERHPIFGNIVEEVAYHEKYPTIYHLRKHLADSTEKADLRLIYL | |
| | ALAHIIKFRGHFLIEGDLNAENTDVQELFKDFVQVYDQTFEESHLSEETVDA | |
| | EEILTEKISKSRKLENLIKQFPNEKKNGLFGNLLALSLGLQPNFKSNFKLSE | |
| | DAKLQFSKDTYDEDLENLLGQIGDEYADLFVAAKNLYDAILLSGILTVTTEI | |
| | TKAPLSASMIKRYDEHHQDLTLLKKFIRQNLPEKYKEIFFDKSKNGYAGYID | |
| | GGASQEDFYKYIKNILSKLDGSEYFLDKIEREDFLRKQRTFDNGSIPHQIHL | |
| | QELKAILRRQGEYYPFLKENQEKIEKILTFRIPYYVGPLARGNSRFAWASRK | |
| | SDETITPWNFEEVVDKEASAQAFITRMTNFDKNLPEEKVLPKHSLLYEKFTV | |
| | YNELTKVKYVTEGMRKPAFFDANQKQEIFDHLFKKNRKVTKKKLLEFLFKEF | |
| | DEFRIVDISGVEKSFNASLGTYHDLLKIIKDKEFLDNEENEKILEDIVLTLT | |
| | LFEDREMIKKRLEKYADLFTKKVLKKLERRRYTGWGRLSAKLINGIRDKQSG | |
| | KTILDYLIDDGFANRNFMQLIHDDSLSFKEEIAKAQVIGETDSLHQVIANLA | |
| | GSPAIKKGILQSIKIVDELVKVMGRYNPENIVVEMARENQTTQKGQRNSRER | |
| | LKRLEEAIKELGSKILKEHPVENTQLQNDKLYLYYLQNGKDMYTGEELDIDR | |
| | LSDYDVDHIIPQSFIKDDSIDNRVLTSSAKARGKSDDVPSEEVVKKMKSFWQ | |
| | QLLKAKLISQRKFDNLTKAERGGLTELDKAGFIKRQLVETRQITKHVAQILD | |
| | SRFNTKYDENDKLIRKVKIITLKSKLVSNFRKDFELYKVREINDYHHAHDAY | |
| | LNAVVGTALIKKYPKLESEFVYGDYPVYNSYKMIAKSEQEIGKATAKYFFYS | |
| | NIMNFFKSDITLANGEIRKRPLIETNEETGEIAWDKDKDIATVRKVLSMPQV | |
| | NIVKKTEVQTGGFSKESILPKRDSDKLIARKKDWDTKKYGGFDSPTVAYSVL | |
| | VVADIEKGKAKKLKTVKELVGITIMERSAFEKNPIAFLEDKGYQNIQKENII | |
| | KLPKYSLFELENGRKRLLASAGELQKGNELALPNKYVTLLYHAKHYEKLKES | |
| | PEDNPEHLEYVDKHRDEFDEILDQISEFSKRYILADKNLEKIKELYKKNEDA | |
| | DIEELASSFINLLTFTALGAPAAFKFFGATIDRKRYTSTTEILNATLIHQSI | |
| | TGLYETRIDLSQLGGD | |
| CasEnd-248 | MKKKYSIGLDIGTNSVGWAVITDEYKVPSKKFKVLGNTDRQSIKKNLIGALL | 208 |
| | FDSGETAEATRLKRTARRRYTRRKNRIRYLQEIFAEEMSKVDDSFFHRLEES | |
| | FLVEEDKRDERHPIFGNIVDEVAYHEKYPTIYHLRKKLADSTEKADLRLVYL | |
| | ALAHIIKFRGHFLIEGDLNSENSDVDKLFIQLVQTYNQLFEENPINEEGVDA | |
| | KAILSAKLSKSRRLENLIAQIPGEKKNGLFGNLIALSLGLTPNFKSNEDLAE | |
| | DAKLQLSKDTYDEDLDNLLAQIGDQYADLFLAAKNLSDAILLSDILTVDSES | |
| | TKAPLSASMIKRYDEHHQDLTLLKALVREQLPEKYKEIFFDKSKNGYAGYID | |
| | GGASQEDFYKYIKPILEKLDGAEELLEKINREDFLRKQRTFDNGSIPHQIHL | |
| | GELHAILRRQEDFYPFLKENREKIEKILTFRIPYYVGPLARGNSRFAWMTRK | |
| | SDETITPWNFEEVVDKEASAQAFIERMTNFDKNLPDEKVLPKHSLLYEYFTV | |
| | YNELTKVKYVTEGMRKPEFLSAEQKEEIVDLLFKKNRKVTVKQLKENYFKKI | |
| | ECFDSVEISGVEDRFNASLGTYHDLLKIIKDKEFLDNEENEDILEDIVLTLT | |
| | LFEDKEMIEERLKKYANLFDKKVLKQLKRRRYTGWGRLSKKLINGIRDKQSG | |
| | KTILDFLKSDGFANRNFMQLIHDDSLTFKEEIQKAQVKGQGDSLHEQIANLA | |
| | GSPAIKKGILQTIKIVDEIVKVMGRHKPENIVIEMARENQTTQKGQKNSRER | |
| | LKRLEEVLKELGSQILKEHPVENTQLQNDKLYLYYLQNGKDMYTGDELDIDR | |
| | LSDYDVDHIIPQSFIKDDSIDNKVLTSSKEARGKSDNVPSEEVVKKMKSYWR | |
| | QLLNAKLISQRKFDNLTKAERGGLSELDKAGFIKRQLVETRQITKHVAQILD | |
| | SRFNTEYDENDKLIRRVKIITLKSKLVSDFRKDFGFYKVREINDYHHAHDAY | |
| | LNAVVGTALIKKYPKLESEFVYGDYKVYDSRKMIAKSEQEIGKATAKMFFYS | |
| | NIMNFFKSEIKLADGEIRKRPQIETNEETGEIVWDKEKDFATVRKVLSMPQV | |
| | NIVKKTEVQTGGFSKESILPKRNSDKLIARKKDWDPKKYGGFDSPTVAYSVL | |
| | VVAKVEKGKKKKLKSVKELVGITIMERSAFEKDPVDFLENKGYKDIQKDLII | |
| | KLPKYSLFELENGRKRLLASAGELQKGNELALPNKYVTFLYLASHYEKLKGS | |
| | PEDEEQHQEYVEQHKYYFDEILEQIEEFSERYILADKNLEKILSLYNEKSDK | |
| | SISEQAENISNLFTFTALGAPAAFKFFDTTIDRKRYTSTKEVLNATLIHQSI | |
| | TGLYETRIDLSQLGGD | |
| CasEnd-249 | MDKKYSIGLDIGTNSVGWAVVTDEYKVPSKKFKVLGNTDRKSIKKNLLGALL | 209 |
| | FDSGETAEATRLKRTARRRYTRRKNRIRYLQEIFAEEMAKVDDSFFHRLEES | |
| | FLVEEDKRGERHPIFGNIVDEVAYHEKYPTIYHLRKHLADSDEKADLRLVYL | |
| | ALAHIIKFRGHFLIEGDLNSENSDVQKLFKELVQVYDQTFEESHLEEEGVDA | |
| | EAILTEKLSKSRRLENLIAQFPGEKKNGLFGNLIALSLGLTPNFKSNEDLSE | |
| | DAKLQFSKDTYDEDLEELLGQIGDEYADLFVAAKNLYDAILLSGILTVDDES | |
| | TKAPLSASMIKRYDEHHQDLTLLKAFIREQLPEKYKEIFFDQSKNGYAGYID | |
| | GGASQEEFYKYLKKILEKIDGSEEFLDKIEREDFLRKQRTFDNGSIPHQIHL | |
| | QELHAIIRRQEKYYPFLKENQEKIEKILTFRIPYYVGPLARGNSRFAWLSRK | |
| | SDETITPWNFDEVVDKEKSAEAFIERMTNFDKNLPNEKVLPKHSLLYEKFTV | |
| | YNELTKVKYVTEGMRKPEFFDAEQKQEIVDGVFKKNRKVTKKQLKEYLFKEF | |
| | DEFRIVEISGVEDRFNASLGTYHDLLKIIKDKDFLDNEENEEILEDIILTLT | |
| | LFEDREMIKKRLEKYADLFDKKQLKKLERRRYTGWGRLSAKLINGIRDKQSG | |
| | KTILDYLIDDGFANRNFMQLIHDDSLTFKEEIEKAQVIGDSESLHELIANLA | |
| | GSPAIKKGILQSLKIVDELVKVMGRYEPENIVIEMARENQTTQKGQKNSRER | |
| | MKRIEEGIKELGSQILKEHPVENTQLQNEKLYLYYLQNGRDMYVDQELDINR | |
| | LSDYDVDHIVPQSFLKDDSIDNKVLTRSDKARGKSDNVPSEEVVKKMKNYWR | |
| | QLLNAKLITQRKFDNLTKAERGGLSELDKAGFIKRQLVETRQITKHVAQILD | |
| | SRFNTEYDENDKLIRDVKIITLKSKLVSDFRKDFELYKVREINNYHHAHDAY | |
| | LNAVVGTALIKKYPKLESEFVYGDYKVYDVRKMIAKSEQEIGKATAKYFFYS | |
| | NIMNFFKSDITLANGEIRKRPLIETNEETGEIVWDKEKDIATVRKVLSMPQV | |
| | NIVKKTEVQTGGFSKESILPKRDSDKLIARKKDWDTKKYGGFDSPTVAYSVL | |
| | VIADVEKGKAKKLKTVKELVGITIMERSAFEKNPVAFLEDKGYQNIKKDNII | |
| | KLPKYSLFELENGRKRLLASAGELQKGNELALPQKYVTLLYHAKHYEKLKGS | |
| | PEDNEEKQLYVEEHKDEFDEILDQISEFAKRYILADANLEKLKKLYEKNRDA | |
| | SIEELAENFIHLLTFTALGAPAAFKFFGKTIDRKRYTSTKEILNATLIHQSI | |
| | TGLYETRIDLSKLGGD | |
| CasEnd-250 | MDKKYSIGLDIGTNSVGWAVITDEYKVPSKKFKVLGNTGRKSIKKNLIGALL | 210 |
| | FDSGETAEATRLKRTARRRYTRRKNRIRYLQEIFADEMSKVDDSFFHRLEES | |
| | FLVEEDKKNERHPIFGNIVEEVAYHEKYPTIYHLRKKLVDSDEKADLRLIYL | |
| | ALAHMIKFRGHFLIEGDLNPDNSDVDKLFHQLVQTYNQLFEEDPIEAEGVDA | |
| | KAILSARLSKSRRLENLIAELPGEKKNGLFGNLIALSLGLTPNFKSNFDLAE | |
| | DAKLQLSKDTYDDDLENLLGQIGDQYADLFVAAKNLSDAILLSDILRVNTES | |
| | TKAPLSASMIKRYDEHHQDLTLLKQLVRKQLPEKYKEIFFDQSKNGYAGYID | |
| | GGASQEEFYKFIKPILEKMDGTEELLAKLEREDLLRKQRTFDNGSIPHQIHL | |
| | GELHAILRRQEKYYPFLKENREKIEKILTFRIPYYVGPLARGNSRFAWMTRK | |
| | SDETITPWNFEEVVDKGASAQSFIERMTNFDKNLPEEKVLPKHSLLYEYFTV | |
| | YNELTKVKYVTEGMRKPEFLSGEQKKAIVDLLFKKNRKVTVKQLKEYYFKNF | |
| | ECFDSVEISGVEDRFNASLGTYHDLLKIIKDKDELDNEENEKILEDIVLTLT | |
| | LFEDREMIKKRLEKYADLFDKKVMKQLKRRRYTGWGRLSRKLINGIRDKQSG | |
| | KTILDFLKEDGFTNRNFMQLIHDDSLTFKDDIKKAQVIGQSDSLHEHIANLA | |
| | GSPAIKKGILQTVKVVDELVKVMGRYKPENIVIEMARENQTTQKGQKNSRER | |
| | MKRIEEGIKELGSQILKEHPVENTQLQNEKLYLYYLQNGRDMYVDQELDINR | |
| | LSDYDVDHIVPQSFLKDDSIDNKVLTRSDKARGKSDNVPSEEVVKKMKNYWR | |
| | QLLNAKLITQRKFDNLTKAERGGLSELDKAGFIKRQLVETRQITKHVAQILD | |
| | SRMNTKYDENDKLIRDVKVITLKSKLVSDFRKDFQFYKVREINNYHHAHDAY | |
| | LNAVVGTALIKKYPKLESEFVYGDYKVYDVRKMIAKSEQEIGKATAKYFFYS | |
| | NIMNFFKSEITLANGEIRKRPLIETNGETGEIVWDKERDFATVRKVLSMPQV | |
| | NIVKKTEVQTGGFSKESILPKRDSDKLIARKKDWDPKKYGGFDSPTVAYSVL | |
| | VVAKVEKGKAKKLKTVKELLGITIMERSEFEKDPIAFLEDKGYKEVKKDLII | |
| | KLPKYSLFELENGRKRMLASAGELQKGNELALPSKYVNFLYLASNYEKLKGS | |
| | EEDNKKKQLYVEQHKEYLDEIIDQISEFSERVILADANLEKVLSAYEKHRDK | |
| | SIEEQAENIIHLFTLTNLGAPAAFKYFNTNIDRKRYTSTKEVLNATLIHQSI | |
| | TGLYETRIDLSQLGGD | |
| CasEnd-251 | MKKKYSIGLDIGTNSVGWAVITDEYKVPSKKFKVLGNTDRHSIKKNLIGALL | 211 |
| | FDSGETAEATRLKRTARRRYTRRKNRIRYLQEIFASEMAKVDDSFFHRLEES | |
| | FLVEEDKDHERHPIFGNIVDEVAYHEKYPTIYHLRKKLADSDEKADLRLIYL | |
| | ALAHMIKFRGHFLIEGDLNSENTDVDKLFIQLVQTYNQLFEENPINEEGVDA | |
| | KAILSAKLSKSRRLENLIAQFPGEKRNGLFGNLIALSLGLTPNFKSNFDLAE | |
| | DAKLQLSKDTYDEDLDNLLGQIGDQYADLFLAAKNLSDAILLSDILTVNDET | |
| | TKAPLSASMIKRYDEHHQDLTLLKALVRQQLPEKYKEIFFDDTKNGYAGYID | |
| | GGASQEEFYKYIKPILEKLDGTEYFLAKINREDFLRKQRTFDNGSIPHQIHL | |
| | GELHAILRRQEEFYPFLKENREKIEKILTFRIPYYVGPLARGNSRFAWMKRK | |
| | SDETITPWNFEEVVDKEASAQAFIERMTNFDKNLPNEKVLPKHSLLYEYFTV | |
| | YNELTKVKYVTEGMRKPEFLSAEQKEAIVDLLFKTNRKVTVKQLKEDYFKKI | |
| | DCFDSVEISGVEDRFNASLGTYHDLLKIIKDKDELDNEENEDILEDIVLTLT | |
| | LFEDREMIEERLEKYADLFDKKVLKQLKRRRYTGWGRLSAKLINGIRDKQSG | |
| | KTILDFLKSDGFANRNFMQLIHDDSLTFKEDIQKAQVKGQSDSLHEQIADLA | |
| | GSPAIKKGILQSIKIVDELVKVMGRHKPENIVIEMARENQTTQKGQKNSRER | |
| | MKRIEEGIKELGSQILKEHPVENTQLQNEKLYLYYLQNGRDMYVDQELDINR | |
| | LSDYDVDHIVPQSFLKDDSIDNKVLTRSDKARGKSDNVPSEEVVKKMKNYWR | |
| | QLLNAKLITQRKFDNLTKAERGGLSELDKAGFIKRQLVETRQITKHVAQILD | |
| | SRFNTNRDENDKLIRDVKIITLKSKLVSDFRKDFEFYKVREINDYHHAHDAY | |
| | LNAVVGTALIKKYPKLESEFVYGDYKVYDVRKMIAKSEQEIGKATAKYFFYS | |
| | NIMNFFKTDITLANGEIRKRPLIETNEETGEIVWDKTKDFATVRKVLSMPQV | |
| | NIVKKTEVQTGGFSKESILPKRESDKLIARKKDWDPKKYGGFDSPTVAYSVL | |
| | VVAKVEKGKAKKLKTVKELVGITIMERSSFEKNPVAFLEDKGYKDIQEELII | |
| | KLPKYSLFELENGRKRLLASAGELQKGNELALPSKYVTFLYLASHYEKLKGK | |
| | PEDNEQKKEYVKQHKDEFDEILDQISEFSERYILADANLDKVLSLYNNNRDK | |
| | DISELAENFIHLFTFTALGAPAAFKFFDTDIDRKRYTSTTEVLNATLIHQSI | |
| | TGLYETRIDLSQLGGD | |
| CasEnd-252 | MKKPYSIGLDIGTNSVGWAVVTDEYKVPSKKFKVLGNTDRSSIKKNLLGALL | 212 |
| | FDSGETAEATRLKRTARRRYTRRKNRILYLQEIFAEEMNKVDDSFFHRLEES | |
| | FLVEEDKRGERHPIFGNIVDEVAYHEKYPTIYHLRKHLADSTEKADLRLVYL | |
| | ALAHIIKFRGHFLIEGDLDAENTDVQKLFKKFVEVYDQTFEESHLSEETVDA | |
| | EAILTEKLSKSRRLENLIAQFPNEKKNGLFGNLIALSLGLQPNFKINFELSE | |
| | DAKLQFSKDTYDEDLENLLGQIGDEYADLFVAAKNLYDAILLSGILTVNDES | |
| | TKAPLSASMIKRYDEHHQDLTLLKAFIRKNLPEKYKEIFFDESKNGYAGYID | |
| | GGASQEEFYKYIKKLLSKIDGSEYFLDKIEREDFLRKQRTFDNGSIPHQIHL | |
| | QELKAILRRQEEYYPFLKENQEKIEKILTFRIPYYVGPLARGNSRFAWASRK | |
| | SDETITPWNFDEVVDKEKSAEAFIERMTNNDKNLPDEKVLPKHSLLYEKFTV | |
| | YNELTKVKYVTEGMGKAQFFDANMKQEIFDGLFKKERKVTKKKLLDFLFKEF | |
| | DEFRIVDISGVEDAFNASLGTYHDLLKIIKDKEFLDNEENEKILEDIVLTLT | |
| | LFEDREMIKKRLSKYADLFDKKQLKKLERRRYTGWGRLSAKLINGIRDKQTG | |
| | KTILDYLIDDGFANRNFMQLIHDDSLSFKEEIAKAQVIGDSDSLHEVIADLA | |
| | GSPAIKKGILQSLKIVDELVKVMGRYAPENIVVEMARENQTTQKGQRNSRER | |
| | LKRLEEAIKELGSKILKEHPVENTQLQNDKLYLYYLQNGKDMYTGEELDIDR | |
| | LSDYDVDHIIPQSFIKDDSIDNRVLVSSAKARGKSDDVPSEEVVKKMKSFWS | |
| | QLLNAKLISQRKFDNLTKAERGGLTELDKAGFIKRQLVETRQITKHVAQILD | |
| | ERFNTEFDENNKLIRNVKIITLKSKLVSQFRKEFELYKVREINDYHHAHDAY | |
| | LNAVVGKALIKKYPKLESEFVYGDYPVYNSYKLVAKSDSEIGKATAKMFFYS | |
| | NIMNFFKSDIKLADGTIVERPQIEVNEETGEIVWDKEKHIATVRKVLSMPQV | |
| | NIVKKTEVQTGGFSKESILPKRDSDKLIARKKDWDTKKYGGFDSPTVAYSVL | |
| | VVADIEKGKAKKLKTVKELVGITIMERSAFEKNPVAFLEDKGYQNIQEENII | |
| | KLPKYSLFELENGRKRLLASAGELQKGNELALPQKYVTLLYHAKHYEKLKEK | |
| | SEDREKHLEYVEQHRDEFDEILDQISEFSKRYILADKNLEKIEELYNKNEDA | |
| | SIEELASSFINLLTFTALGAPAAFKFFGKTIDRKRYTSTKEILNATLIHQSI | |
| | TGLYETRIDLSKLGGD | |
| CasEnd-253 | MDKKYSIGLDIGTNSVGWAVITDEYKVPSKKFKVLGNTDRHSIKKNLIGALL | 213 |
| | FDSGETAEATRLKRTARRRYTRRKNRIRYLQEIFAEEMAKVDDSFFHRLEES | |
| | FLVEEDKKHERHPIFGNIVDEVAYHEKYPTIYHLRKKLADSTDKADLRLIYL | |
| | ALAHMIKFRGHFLIEGDLNSDNSDVDKLFIQLVQTYNQLFEENPINESGVDA | |
| | KAILSAKLSKSRRLENLIAQLPGEKKNGLFGNLIALSLGLTPNFKSNEDLSE | |
| | DAKLQLSKDTYDEDLDNLLAQIGDQYADLFLAAKNLSDAILLSDILTVNSEI | |
| | TKAPLSASMIKRYDEHHQDLTLLKALVRQQLPEKYKEIFFDKSKNGYAGYID | |
| | GGASQEEFYKYIKPILEKMDGTEELLAKINREDLLRKQRTFDNGSIPHQIHL | |
| | GELHAILRRQEDFYPFLKENREKIEKILTFRIPYYVGPLARGNSRFAWMTRK | |
| | SEETITPWNFEEVVDKEASAQAFIERMTNFDKNLPNEKVLPKHSLLYEYETV | |
| | YNELTKVKYITEGMRKPEFLSGEQKKAIVDLLFKKNRKVTVKQLKEDYFKKI | |
| | ECFDSVEISGVEDRFNASLGTYHDLLKIIKDKDFLDNEENEDILEDIVLTLT | |
| | LFEDKEMIEERLKKYAHLFDKKVLKQLKRRRYTGWGRLSRKLINGIRDKQSG | |
| | KTILDFLKSDGFANRNFMQLIHDDSLTFKEAIQKAQVSGQGDSLHEQIANLA | |
| | GSPAIKKGILQTVKIVDELVKVMGRHKPENIVIEMARENQTTQKGQKNSRER | |
| | MKRIEEGIKELGSQILKEHPVENTQLQNEKLYLYYLQNGRDMYVDQELDINR | |
| | LSDYDVDHIVPQSFLKDDSIDNKVLTRSDKARGKSDNVPSEEVVKKMKNYWR | |
| | QLLNAKLITQRKFDNLTKAERGGLSELDKAGFIKRQLVETRQITKHVAQILD | |
| | SRFNTEYDENDKLIREVKIITLKSKLVSDFRKDFQFYKVREINNYHHAHDAY | |
| | LNAVVGTALIKKYPKLESEFVYGDYKVYDVRKMIAKSEQEIGKATAKYFFYS | |
| | NIMNFFKTEITLANGEIRKRPLIETNEETGEIVWDKGKDFATVRKVLSMPQV | |
| | NIVKKTEVQTGGFSKESILPKRNSDKLIARKKDWDTKKYGGFDSPTVAYSVL | |
| | VVAKVEKGKTKKLKTVKELVGITIMERSSFEKDPVAFLEAKGYKEVRKDLII | |
| | KLPKYSLFELENGRKRLLASAGELQKGNELALPQKYVTFLYLASHYEKLKGK | |
| | PEDNEQKLEYVEQHRDEFDEIFEQISEFSERYILADKNLDKILSLYNNIEDK | |
| | SIEELAENFIHLFTFTSLGAPAAFKFFDTTIDRKRYTSTTEILDATLIHQSI | |
| | TGLYETRIDLSQLGGD | |
| CasEnd-254 | MDKPYSIGLDIGTNSVGWAVVTDEYKVPSKKFKVLGNTDRHSIKKNLLGALL | 214 |
| | FDSGETAEATRLKRTARRRYTRRKNRIRYLQEIFAEEMNKVDDSFFHRLEES | |
| | FLVEEDKRGERHPIFGNIVEEVAYHENYPTIYHLRKELADSTEKADLRLVYL | |
| | ALAHIIKFRGHFLIEGDLNSENTDVQKLFIKFVQTYNNTFEESHLSEINVDA | |
| | ESILTAKLSKSRRLENLIKYFPNEKKNGLFGNLIALSLGLQPNFKTNEDLSE | |
| | DAKLQFSKDTYEEDLENLLAQIGDQYADLFVAAKNLYDAILLSGILTVNTEI | |
| | TKAPLSASMIKRYDEHHQDLTLLKDFIRQQLPEKYKEIFFDKSKNGYAGYID | |
| | GGAKQEEFYKYIKPILEKIDGTEYFLDKINREDFLRKQRTFDNGSIPHQIHL | |
| | KELHAIIRRQAEFYPFLKENQEKIEKILTFRIPYYVGPLARGNSRFAWMSRK | |
| | SDETITPWNFEEVVDKEASAQAFIERMTNYDKNLPEEKVLPKHSLLYEKFTV | |
| | YNELTKVKYVTERMRKPAFFDANQKQEIVDGLFKKNRKVTVKQLKEFLFKEF | |
| | DEFDSVEISGVEKRFNASLGTYHDLLKIIKDKDFLDNEENEKILEDIVLTLT | |
| | LFEDREMIRKRLSKYADLFDKKVLKKLKRRRYTGWGRLSAKLINGIRDKQTG | |
| | KTILDYLIDDGFANRNFMQLIHDDSLTFKEEIAKAQVIGKTDSLHEVIADLA | |
| | GSPAIKKGILQSLKIVDELVKVMGRHNPENIVIEMARENQTTQKGQRNSRER | |
| | LKRLEESIKELGSNILKEHPVDNTQLQNDKLYLYYLQNGKDMYTGEELDINR | |
| | LSDYDVDHIIPQSFIKDDSIDNKVLTSSAKARGKSDNVPSIEVVRKMKSYWE | |
| | QLLNAKLISQRKFDNLTKAERGGLTELDKAGFIKRQLVETRQITKHVAQILD | |
| | SRFNTKYDENDKLIRDVKIITLKSKLVSNFRKDFGLYKVREINDYHHAHDAY | |
| | LNAVVGTALIKKYPKLESEFVYGDYPVYNSYKMIAKSEQEIGKATAKYFFYS | |
| | NIMNFFKSDITLANGEIRKRPLIETNDETGEIVWDKKKDFATVRKVLSMPQV | |
| | NIVKKTEVQTGGFSKESILPKRNSDKLIARKKDWDTKKYGGFDSPTVAYSVL | |
| | VIAKIEKGKAKKLKTVKELVGITIMERSSFEKNPVAFLEKKGYQNIQKEVII | |
| | KLPKYSLFELENGRKRLLASAGELQKGNELALPSKYVTLLYHASRYEKLKES | |
| | PEDNEKHLEYVEKHREEFDEILDQISEFSKRYILADKNLEKILELYDKNNEA | |
| | SIEELAESFINLLTFTALGAPAAFKFFGTTIDRKRYTSTTEILSATLIHQSI | |
| | TGLYETRIDLSQLGGD | |
| CasEnd-255 | MKKKYSIGLDIGTNSVGWAVITDEYKVPSKKFKVLGNTDRKSIKKNLLGALL | 215 |
| | FDSGETAEATRLKRTARRRYTRRKNRIRYLQEIFAEEMSKVDDSFFHRLEES | |
| | FLVEEDKKHERHPIFGNIVDEVAYHEKYPTIYHLRKKLADSTEKADLRLIYL | |
| | ALAHMIKFRGHFLIEGDLNPENSDVQKLFIQLVQTYNQLFEESPLEESTVDA | |
| | KAILSAKLSKSRRLENLIAQFPGEKKNGLFGNLIALSLGLTPNFKSNEDLAE | |
| | DAKLQLSKDTYDEDLDNLLAQIGDQYADLFLAAKNLSDAILLSDILTVNDEI | |
| | TKAPLSASMVKRYDEHHQDLTLLKALVRKQLPEKYKEIFFDKSKNGYAGYID | |
| | GGASQEEFYKFIKPILEKVDGTEELLEKLNREDFLRKQRTFDNGSIPHQIHL | |
| | GELHAILRRQEDFYPFLKENREKIEKILTFRIPYYVGPLARGNSRFAWMTRK | |
| | SEETITPWNFEEVVDKEASAEAFIERMTNFDKNLPEEKVLPKHSLLYEMFTV | |
| | YNELTKVKYVTEGMGKPEFLSGEQKQEIVDLLFKTNRKVTVKQLKEDYFKKI | |
| | ECFDSVEISGVEDRFNASLGTYHDLLKIIKDKDFLDNEENEDILEDIVLTLT | |
| | LFEDREMIEERLAKYADLFDKKVLKQLKRRRYTGWGRLSRKLINGIRDKQSG | |
| | KTILDFLKDDGFANRNFMQLIHDDSLTFKEEIQKAQVSGKGDSLHEVIANLA | |
| | GSPAIKKGILQSVKIVDELVKVMGRHAPENIVIEMARENQTTQKGQKNSRER | |
| | MKRIEEGIKELGSQILKEHPVENTQLQNEKLYLYYLQNGRDMYVDQELDINR | |
| | LSDYDVDHIVPQSFLKDDSIDNKVLTRSDKARGKSDNVPSEEVVKKMKNYWR | |
| | QLLNAKLITQRKFDNLTKAERGGLSELDKAGFIKRQLVETRQITKHVAQILD | |
| | SRFNTEYDENDKLIREVKIITLKSKLVSDFRKDFQFYKVREINDYHHAHDAY | |
| | LNAVVGTALIKKYPKLESEFVYGDYKVYDVRKMIAKSDPEIGKATAKYFFYS | |
| | NIMNFFKTEITLANGEIFKRPVIETNKETGEIVWDKEKDFATVRKVLSMPQV | |
| | NIVKKTEVQTGGFSKESILPKRNSDKLIARKKDWDPKKYGGFDSPTVAYSVL | |
| | VVAKVEKGKKKKLKTVKELVGITIMERSSFEKDPIAFLETKGYKDVQEDLII | |
| | KLPKYSLFELENGRKRLLASAGELQKGNELALPQKYVTFLYLAKRYEKLKGS | |
| | LEDNEGKQEYVEQHKHYFDEIMDQIKEFSERYILADKNLEKLLSLFAENRDK | |
| | DIEELAENFIHLFTLTSLGAPAAFKFFDTTIDRKRYTSTSEVLNATLIHQSI | |
| | TGLYETRIDLSQLGGD | |
| CasEnd-256 | MDKKYSIGLDIGTNSVGWAVITDEYKVPSKKFKVLGNTDRHSIKKNLIGALL | 216 |
| | FDSGETAEATRLKRTARRRYTRRKNRICYLQEIFSNEMAKVDDSFFHRLEES | |
| | FLVEEDKRGERHPIFGNIVDEVAYHEKYPTIYHLRKHLADSTEKADLRLVYL | |
| | ALAHIIKFRGHFLIEGDLNSENTDVQKLFKQFVTTYDQTFEESHLNEETVDA | |
| | KSILTEKLSKSRRLENLIKLFPGEKKNGLFGNLIALSLGLTPNFKSNEDLSE | |
| | DAKLQFSKDTYDEDLENLLGQIGDEYADLFAAAKNLYDAILLSGILTVNDES | |
| | TKAPLSASMIKRYDEHHQDLTLLKTFVRQQLPEKYKEIFFDESKNGYAGYID | |
| | GGASQEEFYKYIKPILEKMDGSEYFLDKIEREDFLRKQRTFDNGSIPHQIHL | |
| | KELHAILRRQEEFYPFLKENREKIEKILTFRIPYYVGPLARGNSRFAWASRK | |
| | SDETITPWNFDEVVDKEASAEAFIERMTNNDKNLPDEKVLPKHSLLYEKFTV | |
| | YNELTKVKYVTEGMGKAQFFDAEQKQEIVDLLFKKYRKVTKKKLLDFLDKEF | |
| | EEFRIVDISGVEDAFNASLGTYHDLLKIIKDKDFLDNEENEDILEDIVLTLT | |
| | LFEDREMIEKRLEKYADLFDKKVLKKLERRRYTGWGRLSKKLINGIRDKQTG | |
| | KTILDYLISDGFANRNFMQLIHDDSLSFKEEIAKAQVIGQGDSLHEHIANLA | |
| | GSPAIKKGILQTVKVVDELVKVMGRHKPENIVIEMARENQTTQKGQKNSRER | |
| | MKRIEEGIKELGSQILKEHPVENTQLQNEKLYLYYLQNGRDMYVDQELDINR | |
| | LSDYDVDHIVPQSFLKDDSIDNKVLTRSDKARGKSDNVPSEEVVKKMKNYWR | |
| | QLLNAKLITQRKFDNLTKAERGGLSELDKAGFIKRQLVETRQITKHVAQILD | |
| | SRMNTKYDENDKLIREVKVITLKSKLVSDFRKDFQFYKVREINNYHHAHDAY | |
| | LNAVVGTALIKKYPKLESEFVYGDYKVYDVRKMIAKSEQEIGKATAKYFFYS | |
| | NIMNFFKTEITLANGEIRKRPLIETNGETGEIVWDKGRDFATVRKVLSMPQV | |
| | NIVKKTEVQTGGFSKESILPKRDSDKLIARKKDWDTKKYGGFDSPTVAYSVL | |
| | VVADIEKGKAKKLKTVKELVGITIMERSAFEKNPIAFLEDKGYQNIQEEKII | |
| | KLPKYSLFELENGRKRLLASAGELQKGNELALPAKYVTLLYHAKHYEKLKEK | |
| | PEDNEKHLEYVTKHRDEFKEILDQISEFSERYILADKNLSKIKELYSKNESY | |
| | SIEELASSFINLLTFTALGAPAAFKFLGKTIDRKRYTSTTEILNATLIHQSI | |
| | TGLYETRIDLSKLGGD | |
| CasEnd-257 | MKKPYSIGLDIGTNSVGWAVVTDDYKVPAKKMKVLGNTDKSHIKKNLLGALL | 217 |
| | FDSGNTAEDRRLKRTARRRYTRRRNRILYLQEIFSEEMNKVDDSFFHRLEDS | |
| | FLVPEDKRGERHPIFGNLEEEVKYHENFPTIYHLRKYLADSPEKADLRLVYL | |
| | ALAHIIKFRGHFLIEGKLDTRNNDVQRLFQEFLAVYDNTFENSSLQEQNVQV | |
| | EEILTDKISKSAKKDRVLKLFPNEKSNGRFAEFLKLIVGNQADFKKHFELEE | |
| | KAPLQFSKDTYEEDLENLLAQIGDDYAELFLSAKKLYDSILLSGILTVTDVS | |
| | TKAPLSASMIKRYNEHQSDLTQLKQFIRQKLSDKYNEVFSDVSKDGYAGYID | |
| | GKTNQEAFYKYLKGLLNKIEGSGYFLDKIEREDFLRKQRTFDNGSIPHQIHL | |
| | QEMRAIIRRQAEFYPFLAENQDKIEKILTFRIPYYVGPLARGKSDFAWLSRK | |
| | SADKITPWNFDEIVDKESSAEAFINRMTNYDLYLPNEKVLPKHSLLYEKFTV | |
| | YNELTKVKYKTEQMGKTAFFDANMKQEIFDGVFKVYRKVTKDKLMDFLEKEF | |
| | DEFRIVDLTGLDKAFNASYGTYHDLRKILKDKDFLDNSKNEKILEDIVLTLT | |
| | LFEDREMIRKRLENYSDLLTKEQLKKLERRHYTGWGRLSAKLINGIRNKESR | |
| | KTILDYLIDDGNSNRNFMQLINDDALSFKEEIAKAQVIGETDNLNQVVSDIA | |
| | GSPAIKKGILQSLKIVDELVKIMGGHQPENIVVEMARENQFTNQGRRNSQQR | |
| | LKGLTDSIKEFGSQILKEHPVDNSQLQNDRLFLYYLQNGRDMYTGEELDIDY | |
| | LSQYDIDHIIPQAFIKDNSIDNRVLVSSKEARGKSDDVPSKDVVRKMKSEWS | |
| | KLLSAKLITQRKFDNLTKAERGGLTDDDKAGFIKRQLVETRQITKHVARILD | |
| | ERFNTETDENNKKIRQVKIVTLKSNLVSNFRKEFELYKVREINDYHHAHDAY | |
| | LNAVVGKALLKKYPKLEPEFVYGDYPKFNGYKFVSQIKEEENKATAKKFFYS | |
| | NIMNFFKSDIKLADGQIVERPMIERNDETGEIIWDKTKHISTVKKVLSYPQV | |
| | NIVKKVEEQTGGFSKESILPKGNSDKLIPRKTKWDTKKYGGFDSPIVAYSVL | |
| | VIADIEKGKSKKLKTVKALVGITIMEKMTFEKNPVAFLERKGYQNIQEENII | |
| | KLPKYSLFELENGRKRLLASARELQKGNELVLPNHLVILLYHAKNIHKIDEK | |
| | PEDIPKHLEYVEKHRDEFKELLDVVSNFSKKYTLAEGNLEKIKELYAQNNSA | |
| | DIKELASSFINLLTFTALGAPAAFKFFDKNIDRKRYTSTTEILNATLIHQSI | |
| | TGLYETRIDLSKLGGD | |
| CasEnd-258 | MKKPYSIGLDIGTNSVGWAVITDEYKVPSKKFKVLGNTDRHSIKKNLLGALL | 218 |
| | FDSGETAEATRLKRTARRRYTRRKNRIRYLQEIFSSEMAKVDDSFFHRLEES | |
| | FLVEEDKRHERHPIFGNIVDEVAYHEKYPTIYHLRKKLADSTQKADLRLIYL | |
| | ALAHMIKFRGHFLIEGDLNSDNSDVDKLFIQLVQTYNQLFEENPINESGVDA | |
| | KAILSEKLSKSRRLENLIAQLPGEKKNGLFGNLIALSLGLTPNFKSNFKLAE | |
| | DAKLQFSKDTYDEDLDNLLAQIGDQYADLFLAAKNLSDAILLSGILTVNDEI | |
| | TKAPLSASMIKRYDEHHQDLTLLKALVRQQLPEKYKEIFFDQTKNGYAGYID | |
| | GGASQEEFYKFIKPILEKMDGTEELLTKLNREDLLRKQRTFDNGSIPHQIHL | |
| | GELHAILRRQEDFYPFLKENREKIEKILTFRIPYYVGPLARGNSRFAWMTRK | |
| | SDETITPWNFEEVVDKEASAQAFIERMTNEDKNLPNEKVLPKHSLLYEYFTV | |
| | YNELTKVKYVTEGMRKPEFLSGKQKQEIVDLLFKKNRKVTVKQLKDDYFKKI | |
| | DCFDSVEISGVEDSFNASLGTYHDLLKIIKDKDELDNEENEDILEDIVLTLT | |
| | LFEDREMIEHRLSKYAHLFDKKVLKQLKRRRYTGWGRLSRKLINGIRDKQSG | |
| | KTILDFLKSDGFANRNFMQLIHDDSLTFKEAIQKAQVSGKTDSLHEQIANLA | |
| | GSPAIKKGILQTVKIVDELVKVMGRHNPENIVIEMARENQTTQKGQKNSRER | |
| | MKRIEEGIKELGSQILKEHPVENTQLQNEKLYLYYLQNGRDMYVDQELDINR | |
| | LSDYDVDHIVPQSFLKDDSIDNKVLTRSDKARGKSDNVPSEEVVKKMKNYWR | |
| | QLLNAKLITQRKFDNLTKAERGGLSELDKAGFIKRQLVETRQITKHVAQILD | |
| | SRMNTESDENDKLIREVKIITLKSKLVSDFRKDFQFYKVREINNYHHAHDAY | |
| | LNAVVGTALIKKYPKLESEFVYGDYKVYDVRKMIAKSEQEIGKATAKYFFYS | |
| | NIMNFFKTEITLANGEIRKRPLIETNEETGEIVWDKEKDFATVRKVLSMPQV | |
| | NIVKKTEVQTGGFSKESILPKRNSDKLIARKKDWDTKKYGGFDSPTVAYSVL | |
| | VIAKVEKGKSKKLKSVKELVGITIMERSSFEKDPVAFLEKKGYKNIQDDLII | |
| | KLPKYSLFELENGRKRMLASAGELQKGNELALPQHYVTFLYHASHYEKLKGR | |
| | PEDNEKKLYYVEQHRDYFDEIFSQIEEFSERYILADANLSKVKSLYNNNRDS | |
| | SIREQAENFIHLLTFTSLGAPAAFKFFDTTIDRKRYTSTTEVLDATLIHQSI | |
| | TGLYETRIDLSKLGGD | |
| CasEnd-259 | MDKKYSIGLDIGTNSVGWAVVTDDYKVPSKKFKVLGNTDRKSIKKNLLGALL | 219 |
| | FDSGETAEATRLKRTARRRYTRRKNRICYLQEIFSNEMAKVDDSFFHRLEES | |
| | FLVEEDKRGERHPIFGNIVEEVAYHEKFPTIYHLRKHLADSTEKADLRLVYL | |
| | ALAHIIKFRGHFLIEGDLSSENTDVDKLFIQLVQTYNQLFEENPINASGVDA | |
| | KAILSARLSKSRRLENLIAQLPGEKKNGLFGNLIALSLGLTPNFKSNEDLAE | |
| | DAKLQLSKDTYDDDLDNLLAQIGDQYADLFLAAKNLSDAILLSDILRVSDES | |
| | TKAPLSASMVKRYEEHHKDLTLLKDFIRKQLPEKYKEIFFDKSKNGYAGYID | |
| | GGASQEEFYKYLKKILEKIDGSEEFLDKIEREDFLRKQRTFDNGSIPHQIHL | |
| | QEMHAIIRRQEEYYPFLKENQEKIEKILTFRIPYYVGPLARGNSRFAWLSRK | |
| | SDETITPWNFDEVVDKEASAEAFIERMTNFDKNLPDEKVLPKHSLLYEKFTV | |
| | YNELTKVKYVTEGGKKPKFFDANLKQEIVDLLFKKERKVTKKQLLDFLVKEF | |
| | DEFRIVDISGVEDRFNASLGTYHDLLKILKDKDELDNEENEEILEDIVLTLT | |
| | LFEDREMIKQRLEKYADLFDKKQLKKLERRRYTGWGRLSAKLINGIRDKQTG | |
| | KTILDYLIDDGFANRNFMQLIHDDSLSFKEEIAKAQVIGQGDSLHETIANLA | |
| | GSPAIKKGILQSLKIVDELVKVMGRHEPENIVVEMARENQTTAKGQKNSRER | |
| | MKRIEEGIKELGSQILKEHPVENTQLQNEKLYLYYLQNGRDMYVDQELDINR | |
| | LSDYDVDHIVPQSFLKDDSIDNKVLTRSDKARGKSDNVPSEEVVKKMKNYWR | |
| | QLLNAKLITQRKFDNLTKAERGGLTDDDKAGFIKRQLVETRQITKHVAQILD | |
| | SRFNTEYDENGKLIRDVKIITLKSKLVSQFRKEFELYKVREINDYHHAHDAY | |
| | LNAVVGTALIKKYPKLESEFVYGDYPKYNLRKLIKKSDRERGKATAKMFFYS | |
| | NIMNFFKSDVKLADGDVRERPIIEVNEETGEIIWDKGKHIATVKKVLSMPQV | |
| | NIVKKTEVQTGGFSKESILPKRDSDKLIARKKDWDTKKYGGFDSPTVAYSVL | |
| | VVADVEKGKAKKLKTVKELVGITIMERSAFEKDPVAFLEDKGYQNIQKDNII | |
| | KLPKYSLFELENGRKRLLASAGELQKGNELALPNHLVTLLYHAKHIEKLDGK | |
| | PEDEKEKLLYVEKHRDEFDEIFDQISEFSKRYILADANLEKIKELYEKNFEA | |
| | SIEELASSFINLLTFTALGAPAAFKFFGKDIDRKRYTSTKEILNATLIHQSI | |
| | TGLYETRIDLSKLGGD | |
| CasEnd-260 | MDKKYSIGLDIGTNSVGWAVITDEYKVPSKKFKVLGNTDRQSIKKNLIGALL | 220 |
| | FDSGETAEATRLKRTARRRYTRRKNRICYLQEIFSEEMAKVDDSFFHRLEES | |
| | FLVEEDKKHERHPIFGNIVDEVAYHEKYPTIYHLRKKLVDSTDKADLRLIYL | |
| | ALAHMIKFRGHFLIEGDLNPDNSDVDKLFIQLVQTYNQTFEENPINASGVDA | |
| | KAILSERLSKSRRLENLIAQLPNEKKNGLFGNLIALSLGLTPNFKSNFDLAE | |
| | DAKLQLSKDTYDDDLDNLLGQIGDQYADLFLAAKNLSDAILLSDILRVNTEI | |
| | TKAPLSASMIKRYDEHHQDLTLLKALVRQQLPEKYKEIFFDKSKNGYAGYID | |
| | GGASQEEFYKFIKPILEKMDGTEELLVKLNREDLLRKQRTFDNGSIPHQIHL | |
| | GELHAILRRQEDFYPFLKDNREKIEKILTFRIPYYVGPLARGNSRFAWMTRK | |
| | SDETITPWNFEEVVDKGASAQSFIERMTNFDKNLPNEKVLPKHSLLYEYFTV | |
| | YNELTKVKYVTEGMRKPAFLSGEQKKEIVDLLFKTNRKVTVKQLKEDYFKEI | |
| | ECFDSVEISGVEDRFNASLGTYHDLLKIIKDKDFLDNEENEDILEDIVLTLT | |
| | LFEDREMIEKRLKTYANLFDKKVMKQLKRRRYTGWGRLSRKLINGIRDKQSG | |
| | KTILDFLKSDGFANRNFMQLIHDDSLTFKEDIQKAQVSGQGDSLHEQIANLA | |
| | GSPAIKKGILQTIKVVDELVKVMGRHKPENIVIEMARENQTTQKGQKNSRER | |
| | MKRIEEGIKELGSQILKEHPVENTQLQNEKLYLYYLQNGRDMYTDQELDINR | |
| | LSDYDVDHIVPQSFLKDDSIDNKVLTSSKKARGKSDNVPSEEVVKKMKSYWR | |
| | QLLNAKLITQRKFDNLTKAERGGLSELDKAGFIKRQLVETRQITKHVAQILD | |
| | SRMNTKYDENDKLIRDVKVITLKSKLVSDFRKDFQFYKVREINNYHHAHDAY | |
| | LNAVVGTALIKKYPKLESEFVYGDYKVYDSRKMIAKSEQEIGKATAKYFFYS | |
| | NIMNFFKSEITLANGTIRKRPVIETNEETGEIVWDKGRDFATVRKVLSMPQV | |
| | NIVKKTEVQTGGFSKESILPKRNSDKLIARKKDWDPKKYGGFDSPTVAYSVL | |
| | VVAKVEKGKTKKLKSVKELLGITIMERSSFEKNPVDFLEAKGYKEIQEDLII | |
| | KLPKYSLFELENGRKRLLASAGELQKGNELALPQKYVTFLYHASHYEKLKGK | |
| | PEDEEKKQLFVEQHNHYFDEIVEQIEEFSERYILADKNLEKIKSLYNNHEDY | |
| | SIREQAENIINLETLINLGAPAAFKYFDTTIDRKRYTSTKEILNATLIHQSI | |
| | TGLYETRIDLSQLGGD | |
| CasEnd-261 | MDKPYSIGLDIGTNSVGWAVVTDEYKVPSKKFKVLGNTDRKSIKKNLWGVLL | 221 |
| | FDSGETAEATRLKRTARRRYTRRKNRILYLQEIFAEEINKVDENFFHRLEES | |
| | FLVEEDKRGERHPIFANIVEEVAYHEDYPTIYHLRKHLADTPEKADLRLVYL | |
| | ALAHIIKFRGHFLIEGKEDVENTDIQETFKEFLEIYDETVEESELEIENIDV | |
| | ESILTDKISKSRRKEEVLKLFPNQKKNSIFAEFLKLIVGLTPNFKSFFNLEE | |
| | DAKLQFSKDTYEEDLEELLGQIGDEYAEVFVSAKRVYDSIVLSGILTVKDNS | |
| | TKAKLSASMVQRYDEHHQDLTKLKKFIRKNFPDEYKDIFFDQSKDGYAGYID | |
| | GGAKQEDFYKYLKKLLNKIEGSEYFLEKIENEDFLRKQRTFDNGSIPHQVHL | |
| | QEMKAIIKNQGEYYPFLKENQDKIQQILTFRIPYYVGPLARGNSRFAWLSRK | |
| | SDETITPWNFDDIIDKEKSAEKFIERMTNFDKNLPDEKVLPKHSLLYEKFTV | |
| | YNELTKVKYIDEQGKEKQFFDANLKQEIFNELFKKERKVTKKQLLDYLKKEF | |
| | YELRIVDISGVEDRFNASLSTYHDLKKILGNEEFLDDPKNAEMLEEIIKTLT | |
| | LFEDRKMIKKRLEKYSDILSKEQIKKLSRRRYTGWGRLSAKLLNGIRDKETN | |
| | KTILDYLIEDDNSNRNFMQLIHDDNLSFKEEIEKAQVIDDTESLHEVIANLA | |
| | GSPAIKKGILQSLKIVDEIVKVMGRYAPKNIVVEMARENQTTQKGQKNSRER | |
| | MKRLQEAMKEFGKDLLKEYPTDNTKLQNDKLYLYYLQNGKDMYTGEALDIDN | |
| | LSDYDVDHIVPQSFLKDDSIDNRVLVSSKEARGKSDDVPSIDIVRKMIGFWK | |
| | KLLDAKLITQRKYDNLTKGERGELTELDKAGFIKRQLVETRQITKHVAQILD | |
| | ERFNAEVDDDGKLIRKTKIVTLKSKLTSQFRKEFGLYKVREINNYHHAHDAY | |
| | LNAVVAKALIKVYPKLESEFVYGDYPVFDVKKEKRESKREIGKATQKKFFYS | |
| | NLMNMFKSDVKLADDSVVEKDIVDFNDETGEILWDKDKHISTIKKVLSMPQV | |
| | NIVKKTEVQTGGFSKESILPKRDSDKLIARKKDWNTEKYGGFDSPTVAYSVV | |
| | VIADIEKGKAKKLKTIKEIIGITIMERSAFEQDEVAFLENKGYQNIQENNLV | |
| | KLPKYSLYELENGRKRLLASAGELQKGNELALPNHYVELLYHAKRYEKIKRE | |
| | NDESEYSENYLQEHREEFNDLLDQVKEFAERYTLADANLEKIKKLFEENEEA | |
| | DLEELAKSFVNLLSFTAMGAPAAFKFFGKNIDRKRYTSIKELLNATIIHQSI | |
| | TGLYETRIDLSKLGED | |
| CasEnd-262 | MKKPYSIGLDIGTNSVGWAVVTDDYKVPSKKMKVLGNTDRSSIKKNLLGALL | 222 |
| | FDSGETAEATRLKRTARRRYTRRKNRILYLQEIFAEEMNKVDESFFHRLEDS | |
| | FLVEEDKRGERHPIFGNIVEEVKYHEEFPTIYHLRKHLADSKEKADLRLVYL | |
| | ALAHIIKFRGHFLIEGDLDTRNTDIQELFKEFLKVYDNTFENSHLSEETADV | |
| | EEILTDKLSKSAKKDKLLKLFPNEKSNGFFAEFLKLIVGNQADFKKHFSLSE | |
| | KAKLQFSKDTYEEDLETLLGQIGDEYADVFVAAKKLYDSILLSGILTVTDLS | |
| | TKAPLSASMVQRYEEHHEDLTKLKKFIRKKLPEKYKEFFFDTSKNGYAGYID | |
| | GGTKQEDFYKYLKKLLSKIEGSEYFLEKIEREDFLRKQRTFDNGSIPHQIHL | |
| | QELRAIIRRQGEYYPFLKENQDKIEQILTFRIPYYVGPLARGNSRFAWASRK | |
| | SDETITPWNFEEIIDKESSAEAFITRMTNNDLYLPEEKVLPKHSLLYEKFTV | |
| | YNELTKVKYITEQMGETEFFDANMKQEIFDGVFKKYRKVTKKKLINFLEKEF | |
| | DEFRIVDLSGVEKAFNASLGTYHDLLKILGDKEFLDDPANEKILEDIIQTLT | |
| | LFEDREMIKKRLSKYRDLFTKAQLKKLERRHYTGWGRLSAKLINGIRDKETG | |
| | KTILDYLIDDGRSNRNFMQLIHDDALSFKEEIAKAQVIGESESLHEVVAELA | |
| | GSPAIKKGILQSLKIVDELVKVMGRYNPENIVVEMARENQTTAKGQRNSRER | |
| | LKGLEDSMKELGSDILKEYPVDNSQLQNDRLYLYYLQNGKDMYTGEALDIDN | |
| | LSQYDVDHIIPQSFIKDDSIDNRVLVSSAKARGKSDDVPSKEVVHKMKPFWK | |
| | KLLDAKLISQRKYDNLTKAERGGLTDDDKAGFIKRQLVETRQITKHVAQILD | |
| | ERFNEEKDENNKLIRKVKIVTLKSKLVSQFRKEFELYKVREINDYHHAHDAY | |
| | LNAVVAKALITKYPKLEPEFVYGDYPKYNSYKLVSYSNEERGKATSKMFFYS | |
| | NLMNFFKKDVKLADGNVVERPDIEVNDETGEIAWDKTKHISTVKKVLSMPQV | |
| | NIVKKTEVQTGGFSKESILPKRNSDKLIARKKKWDTKKYGGFDSPIVAYSVL | |
| | VVADIKKGKKKKLKTVKEIVGITIMEKSTFEKDPIAFLEDKGYQNIREENII | |
| | KLPKYSLFELENGRKRLLASAGELQKGNELALPQHLVTLLYHAKRIEEFDEK | |
| | EEDEPEHLNYVMKHRSEFKELFDQVSEFSERYILADKNLEKIEELYDQNESA | |
| | DIKELASSFINLLTFTALGAPADFKFFGGDIDRKRYTSTTEILNATLIHQSI | |
| | TGLYETRIDLSKLGED | |
| CasEnd-263 | MDKPYSIGLDIGTNSVGWAVVTDEYKVPSKKFKVLGNTDRHSIKKNLLGALL | 223 |
| | FDSGETAEATRLKRTARRRYTRRKNRIRYLQEIFAEEMAKVDDSFFHRLEES | |
| | FLVEEDKRGERHPIFGNIVDEVAYHEEYPTIYHLRKHLADSDEKADLRLIYL | |
| | ALAHIIKFRGHFLIEGDLNAENSDVQKLFQALVETYDQTFEESPLSEETVDA | |
| | EVILTAKVSKSRRLENLIKQFPNEKKNGLFGNLVALSLGLKPNFKTNFELSE | |
| | DAKLQFSKDTYDEDLENLLGQIGDQYADLFAAAKNLSDAILLSGILTVNTEI | |
| | TKAPLSASMIKRYDEHHQDLTLLKAFIRQQLPEKYKEIFFDKSKNGYAGYID | |
| | GGASQEDFYKYIKPILSKMDGSEYFLDKINREDFLRKQRTFDNGSIPHQIHL | |
| | QELHAILRRQEEYYPFLKENQEKIEKILTFRIPYYVGPLARGNSRFAWMKRK | |
| | SDETITPWNFEEVVDKEASAQAFIERMTNNDKNLPNEKVLPKHSLLYEMFTV | |
| | YNELTKVKYVTEGMRKPAFFSSEQKQEIVDLLFKKNRKVTKKKLLEYLFKKF | |
| | DEFRSVDISGVEKAFNASLGTYHDLLKIIKDKEFLDNEENQDILEDIVLTLT | |
| | LFEDREMIEQRLSKYADLFDKKVLKKLKRRRYTGWGRLSAKLINGIRDKQSG | |
| | KTILDYLKDDGFANRNFMQLIHDDSLSFKEEIAKAQVIGKNDSLHEVIANLA | |
| | GSPAIKKGILQSLKIVDELVKVMGRYNPENIVIEMARENQTTQKGQRNSRER | |
| | LKRLEEGIKELGSNILKEHPVENTQLQNDKLYLYYLQNGKDMYTGEELDIDR | |
| | LSDYDVDHIIPQSFIKDDSIDNRVLVSSAKARGKSDDVPSEEVVKKMKGFWH | |
| | KLLKAKLISQRKFDNLTKAERGGLSELDKAGFIKRQLVETRQITKHVAQILD | |
| | SRFNTKYDENDKLIRDVKIITLKSKLVSQFRKDFKFYKVREINDYHHAHDAY | |
| | LNAVVGTALIKKYPKLESEFVYGDYPVYDSYKMIAKSEQEIGKATAKYFFYS | |
| | NIMNFFKTDITLANGEIRKRPLIETNEETGEIVWDKEKDFATVRKVLSMPQV | |
| | NIVKKTEVQTGGFSKESILPKRNSDKLIARKKDWDTKKYGGFDSPTVAYSVL | |
| | VIADIEKGKTKKLKTVKELVGITIMERSSFEKNPILFLEDKGYQNIQKDNII | |
| | KLPKYSLFELENGRKRLLASAGELQKGNELALPQHYVTLLYHAKHYEKLKES | |
| | PEDNEKHLEYVIKHRDEFDEILDQISEFSKRYILADKNLEKIKELYSKNREA | |
| | DISELAKSFINLLTFTALGAPAAFKFLGADIDRKRYTSTTEILDATLIHQSI | |
| | TGLYETRIDLSQLGGD | |
| CasEnd-264 | MDKKYSIGLDIGTNSVGWAVITDEYKVPSKKFKVLGNTDRHSIKKNLIGALL | 224 |
| | FDSGETAEATRLKRTARRRYTRRKNRICYLQEIFSNEMAKVDESFFHRLEES | |
| | FLVEEDKKGERHPIFGNIVEEVAYHEKYPTIYHLRKHLADSTEKADLRLVYL | |
| | ALAHIIKFRGHFLIEGDLNIENTDVQKLFEQFVQVYDKTFEESHLEEETIDA | |
| | KAILTEKLSKSRRLENLIAQFPGEKKNGLFGNLIALSLGLTPNFKANFQLSE | |
| | DAKLQLSKDTYDEDLENLLGQIGDEYADLFVAAKNLYDAILLSGILTVNDLS | |
| | TKAPLSASMIKRYDEHHQDLTLLKAFVREQLPEKYKEIFFDSTKNGYAGYID | |
| | GGASQEEFYKYIKKILSKIDGSEYFLDKIEREDFLRKQRTFDNGSIPHQIHL | |
| | QELHAILRRQEAYYPFLKENQEKIEKILTFRIPYYVGPLARGNSRFAWASRK | |
| | SDETITPWNFEEVVDKEASAEAFIERMTNFDKNLPEEKVLPKHSLLYEKFTV | |
| | YNELTKVKYVTEGMGKAQFFDANQKQEIFDGLFKKERKVTKKKLLDFLDKEF | |
| | DEFRIVDISGVEDAFNASLGTYHDLLKIIKDKDFLDDEENEDILEDIILTLT | |
| | LFEDREMIEKRLSKYEDLFTKKVLKQLERRRYTGWGRLSKKLINGIRDKESG | |
| | KTILDYLISDGHANRNFMQLIHDDSLSFKEEIKKAQVKGEVDSLHEHIANLA | |
| | GSPAIKKGILQTVKVVDELVKVMGRHKPENIVIEMARENQTTQKGQKNSRER | |
| | MKRIEEGIKELGSQILKEHPVENTQLQNEKLYLYYLQNGRDMYVDQELDINR | |
| | LSDYDVDHIVPQSFLKDDSIDNKVLTRSDKARGKSDNVPSEEVVKKMKNYWR | |
| | QLLNAKLITQRKFDNLTKAERGGLSELDKAGFIKRQLVETRQITKHVAQILD | |
| | SRMNTKYDENDKLIREVKVITLKSKLVSDFRKDFQFYKVREINNYHHAHDAY | |
| | LNAVVGTALIKKYPKLESEFVYGDYKVYDVRKMIAKSEQEIGKATAKYFFYS | |
| | NIMNFFKTEITLANGEIRKRPLIETNGETGEIVWDKGRDFATVRKVLSMPQV | |
| | NIVKKTEVQTGGFSKESILPKRDSDKLIARKKDWDTKKYGGFDSPTVAYSVL | |
| | VVADIEKGKKKKLKTVKELVGITIMERSSFEKDPVAFLEKKGYQNIQEDLII | |
| | KLPKYSLFELENGRKRLLASAGELQKGNELALPQKYVTLLYHAKHYEKLKEK | |
| | PENIEEHLEYVEQHRDEFDEIFEQIEEFSKRYVLADKNLEKILELYAKNENF | |
| | SIEELAKSFINLLTFTALGAPAAFKFFGETIDRKRYTSTKECLNATLIHQSI | |
| | TGLYETRIDLSKLGGD | |
| CasEnd-265 | MDKKYSIGLDIGTNSVGWAVITDEYKVPSKKFKVLGNTDRHSIKKNLIGALL | 225 |
| | FDSGETAEATRLKRTARRRYTRRKNRICYLQEIFSNEMAKVDDSFFHRLEES | |
| | FLVEEDKKHERHPIFGNIVDEVAYHEKYPTIYHLRKKLVDSTDKADLRLIYL | |
| | ALAHMIKFRGHFLIEGDLNPDNSDVDKLFIQLVQTYNQLFEENPINASGVDA | |
| | KAILSARLSKSRRLENLIAQLPGEKKNGLFGNLIALSLGLTPNFKSNFDLAE | |
| | DAKLQLSKDTYDDDLDNLLAQIGDQYADLFLAAKNLSDAILLSDILRVNTEI | |
| | TKAPLSASMIKRYDEHHQDLTLLKALVRQQLPEKYKEIFFDQSKNGYAGYID | |
| | GGASQEEFYKFIKPILEKMDGTEELLVKLNREDLLRKQRTFDNGSIPHQIHL | |
| | GELHAILRRQEDFYPFLKDNREKIEKILTFRIPYYVGPLARGNSRFAWMTRK | |
| | SEETITPWNFEEVVDKGASAQSFIERMTNFDKNLPNEKVLPKHSLLYEYFTV | |
| | YNELTKVKYVTEGMRKPAFLSGEQKKAIVDLLFKTNRKVTVKQLKEDYFKKI | |
| | ECFDSVEISGVEDRFNASLGTYHDLLKIIKDKDFLDNEENEDILEDIVLTLT | |
| | LFEDREMIEERLKTYAHLFDDKVMKQLKRRRYTGWGRLSRKLINGIRDKQSG | |
| | KTILDFLKSDGFANRNFMQLIHDDSLTFKEDIQKAQVSGQGDSLHEHIANLA | |
| | GSPAIKKGILQTVKVVDELVKVMGRHKPENIVIEMARENQTTQKGQKNSRER | |
| | MKRIEEGIKELGSQILKEHPVENTQLQNEKLYLYYLQNGRDMYVDQELDINR | |
| | LSDYDVDHIVPQSFLKDDSIDNKVLTRSDKARGKSDNVPSEEVVKKMKNYWR | |
| | QLLNAKLITQRKFDNLTKAERGGLSELDKAGFIKRQLVETRQITKHVAQILD | |
| | SRMNTKYDENDKLIREVKVITLKSKLVSDFRKDFQFYKVREINNYHHAHDAY | |
| | LNAVVGTALIKKYPKLESEFVYGDYKVYDVRKMIAKSEQEIGKATAKYFFYS | |
| | NIMNFFKTEITLANGEIRKRPLIETNGETGEIVWDKGRDFATVRKVLSMPQV | |
| | NIVKKTEVQTGGFSKESILPKRDSDKLIARKKDWDTKKYGGFDSPTVAYSVL | |
| | VVAKIEKGKAKKLKTVKELVGITIMERSAFEKDPVAFLEDKGYQNIQKDLFI | |
| | KLPKYSLFELENGRKRLLASAGELQKGNELALPQHYVTLLYHAKNYEKLKGS | |
| | PEDEKEHLIYIEEHREEFDEILDQIIEFSERYILKDANLEKIKELYEKNFEA | |
| | SIEELATSFINLLTFTALGAPAAFKFFGTDIDRKRYTSTKEILNSTLIHQSI | |
| | TGLYETRIDLSKLGGD | |
| CasEnd-266 | MDKKYSIGLDIGTNSVGWAVITDEYKVPSKKFKVLGNTDRHSIKKNLLGALL | 226 |
| | FDSGETAEATRLKRTARRRYTRRKNRIRYLQEIFAEEMSKVDDSFFHRLEES | |
| | FLVEEDKRGERHPIFGNIVDEVAYHEKYPTIYHLRKHLADSTEKADLRLIYL | |
| | ALAHIIKFRGHFLIEGKLNSENTDVQKLFIQFVQTYDQLFEESHLSEETVDA | |
| | EAILTEKLSKSRRLENLIKQFPGEKKNGLFGNLLALSLGLTPNFKSNEDLSE | |
| | DAKLQFSKDTYDEDLENLLAQIGDQYADLFVAAKNLSDAILLSGILTVNTEI | |
| | TKAPLSASMIKRYDEHHQDLTLLKKFVRQQLPEKYKEIFFDQSKNGYAGYID | |
| | GGASQEDFYKYIKPILSKLDGSEYFLDKIEREDFLRKQRTFDNGSIPHQIHL | |
| | QELHAILRRQEEFYPFLKENQEKIEKILTFRIPYYVGPLARGNSRFAWMSRK | |
| | SDETITPWNFEEVVDKEASAEAFIERMTNVDKNLPEEKVLPKHSLLYEKFTV | |
| | YNELTKVKYITEGMRKPAFLSAEQKEEIVDLLFKKNRKVTVKKLKEFLFKKI | |
| | ECFDSVEISGVEDRFNASLGTYHDLLKIIKDKAFLDNEENEEILEDIVLTLT | |
| | LFEDREMIEQRLSKYADLFDKKVLKKLKRRRYTGWGRLSAKLINGIRDKQSG | |
| | KTILDFLIDDGFANRNFMQLIHDDSLTFKEEIQKAQVIGETDSLHEVIANLA | |
| | GSPAIKKGILQSLKIVDELVKVMGRHAPENIVIEMARENQTTQKGQKNSRER | |
| | LKRLEEGIKELGSQILKEHPVDNTQLQNDKLYLYYLQNGKDMYTGEELDIDR | |
| | LSDYDVDHIIPQSFIKDDSIDNRVLTSSSKARGKSDNVPSIEVVKKMKSFWR | |
| | QLLNAKLISQRKFDNLTKAERGGLSELDKAGFIKRQLVETRQITKHVAQILD | |
| | SRFNTKYDENDKLIREVKIITLKSKLVSDFRKDFELYKVREINDYHHAHDAY | |
| | LNAVVGTALIKKYPKLESEFVYGDYKVYDSRKMIAKSEQEIGKATAKYFFYS | |
| | NIMNFFKSEVTLANGEIRKRPLIETNEETGEIVWDKEKDFATVKKVLSMPQV | |
| | NIVKKTEVQTGGFSKESILPKRNSDKLIARKKDWDTKKYGGFDSPTVAYSVL | |
| | VIAKVEKGKTKKLKTVKELVGITIMERSAFEKDPVAFLEKKGYQNIRKDNII | |
| | KLPKYSLFELENGRKRLLASAGELQKGNELALPNKYVTLLYHAKHYEKLKES | |
| | PEDNEKKLEYVKQHRDEFDEILDQISEFSERYILADKNLEKIQELYKQNREA | |
| | DIEELAESFINLFTFTALGAPAAFKFFDTTIDRKRYTSTTEILNATLIHQSI | |
| | TGLYETRIDLSQLGGD | |
| CasEnd-267 | MDKSYSIGLDIGTNSVGWAVITDEYKVPSKKFKVLGNTDRQSIKKNLLGALL | 227 |
| | FDSGETAEATRLKRTARRRYTRRKNRIRYLQEIFAEEMSKVDDSFFHRLEES | |
| | FLVEEDKKGERHPIFGNIVDEVAYHEKYPTIYHLRKKLADTTDKADLRLIYL | |
| | ALAHIIKFRGHFLIEGDLNPENSDVAKLFIQLVQTYNQLFEENPIDTSGVDA | |
| | KAILSAKLSKSRRLENLIALFPGEKKNGLFGNLIALSLGLTPNFKSNEDLTE | |
| | DAKLQLSKDTYDEDLDNLLGQIGDQYADLFLAAKNLSDAILLSDILTVNDES | |
| | TKAPLSASMIKRYDEHHQDLTLLKALVRKQLPEKYKEIFFDESKNGYAGYID | |
| | GGASQEEFYKYIKPILEKMDGAEELLAKLNREDLLRKQRTFDNGSIPHQIHL | |
| | GELHAILRRQEDFYPFLKENREKIEKILTFRIPYYVGPLARGNSRFAWMTRK | |
| | SEETITPWNFEEVVDKEASAQAFIERMTNFDKNLPNEKVLPKHSLLYEYFTV | |
| | YNELTKVKYVTEGMRKPEFLSGEQKEEIVDLLFKTNRKVTVKQLKEDYFKEI | |
| | ECFDSVEISGVEDRFNASLGTYHDLLKIIKDKDFLDNEENEKILEDIILTLT | |
| | LFEDREMIEQRLEKYAHLFDKKVMKQLKRRRYTGWGRLSRKLINGIRDKQSG | |
| | KTILDFLKSDGFANRNFMQLIHDDSLTFKEEIQKAQVVGQGESLHEQIANLA | |
| | GSPAIKKGILQTIKIVDELVKVMGRHKPENIVIEMARENQTTQKGQKNSRER | |
| | MKRIEEGIKELGSQILKEHPVENTQLQNEKLYLYYLQNGRDMYVDQELDINR | |
| | LSDYDVDHIVPQSFLKDDSIDNKVLTRSDKARGKSDNVPSEEVVKKMKNYWR | |
| | QLLNAKLITQRKFDNLTKAERGGLSELDKAGFIKRQLVETRQITKHVAQILD | |
| | SRMNTEYDENDKLIREVKIITLKSKLVSDFRKDFQFYKVREINDYHHAHDAY | |
| | LNAVVGTALIKKYPKLESEFVYGDYKVYDVRKMIRKSEKEIGKATAKYFFYS | |
| | NIMNFFKTEVTLANGEIRKRPLIETNEETGEIVWDKEKDFATVRKVLSMPQV | |
| | NIVKKTEVQTGGFSKESILPKRDSDKLIARKKDWDPKKYGGFDSPTVAYSVL | |
| | VVAKIEKGKSKKLKSVKELVGITIMERSSFEKDPVAFLEAKGYKNIQKDLII | |
| | KLPKYSLFELENGRKRLLASAGELQKGNELALPNKYVRFLYLAHHYEKLKGK | |
| | PEDNENKLEYVEQHRKYFDEILEQIKEFSERYILADKNLDKIKSTYAKNRDK | |
| | PINELAENFIHLFTLTALGAPAAFKFEDTTIDRKRYTSTSEVLNATLIHQSI | |
| | TGLYETRIDLSQLGGD | |
| CasEnd-268 | MDKKYSIGLDIGTNSVGWAVITDEYKVPSKKFKVLGNTDRKSIKKNLLGALL | 228 |
| | FDSGETAEATRLKRTARRRYTRRKNRILYLQEIFAEEMAKVDDSFFHRLEES | |
| | FLVEEDKRFERHPIFGNIVDEVAYHEKYPTIYHLRKKLADSDEKADLRLVYL | |
| | ALAHIIKFRGHFLIEGDLNAENTDVQKLFKQLVQTYNQTFEESHLEEEGVDA | |
| | EAILTEKLSKSRRLENLIAQFPGEKKNGLFGNLIALSLGLTPNFKSNEDLSE | |
| | DAKLQFSKDTYDEDLENLLGQIGDEYADLFLAAKNLYDAILLSGILTVDDES | |
| | TKAPLSASMVKRYDEHHQDLTLLKAFIRKQLPEKYKEIFFDQSKNGYAGYID | |
| | GGASQEEFYKYIKKILEKIDGSEEFLDKIEREDFLRKQRTFDNGSIPHQIHL | |
| | QELHAILRRQEKYYPFLKENQEKIEKILTFRIPYYVGPLARGNSRFAWMSRK | |
| | SDETITPWNFEEVVDKEASAEKFIERMTNFDKNLPNEKVLPKHSLLYEKFTV | |
| | YNELTKVKYVTEGGRKPEFFDAEQKQEIFDLLFKKNRKVTKKQLKEYLFKEF | |
| | DEFDSVEISGVEDRFNASLGTYHDLLKIIKDKDFLDNEENEKILEDIILTLT | |
| | LFEDREMIKERLEKYADLFDKKQLKKLKRRRYTGWGRLSAKLINGIRDKQSG | |
| | KTILDYLIDDGFANRNFMQLIHDDSLTFKEEIEKAQVIGDGDSLHELIANLA | |
| | GSPAIKKGILQSLKIVDELVKVMGRHAPENIVIEMARENQTTQKGQKNSRER | |
| | MKRLEEAIKELGSKILKEHPVENTQLQNDKLYLYYLQNGKDMYTGEELDIDR | |
| | LSDYDVDHIVPQSFLKDDSIDNRVLTSSKKARGKSDDVPSEEVVKKMKNFWR | |
| | KLLEAKLITQRKFDNLTKAERGGLTELDKAGFIKRQLVETRQITKHVAQILD | |
| | SRFNTKYDENDKLIRDVKIITLKSKLVSQFRKDFELYKVREINNYHHAHDAY | |
| | LNAVVGTALIKKYPKLESEFVYGDYKVYDVRKMIAKSEQEIGKATAKYFFYS | |
| | NIMNFFKTEVKLADGEIRKRPLIETNEETGEIVWDKEKDFATVRKVLSMPQV | |
| | NIVKKTEVQTGGFSKESILPKRDSDKLIARKKDWDTKKYGGFDSPTVAYSVL | |
| | VIAKVEKGKAKKLKTVKELVGITIMERSSFEKNPIAFLEDKGYKNVKKDLII | |
| | KLPKYSLFELENGRKRLLASAGELQKGNELALPQKYVILLYHAKHYEKLKGS | |
| | PEDNEQHQIYVEQHKEEFDEIFDQIIEFSKRYILADANLEKIKSLYEKNRDA | |
| | SIEELAESFINLLTFTALGAPAAFKFFGTTIDRKRYTSTKEILNATLIHQSI | |
| | TGLYETRIDLSKLGGD | |
| CasEnd-269 | MDKKYSIGLDIGTNSVGWAVITDEYKVPSKKFKVLGNTDRKSIKKNLIGALL | 229 |
| | FDSGETAEATRLKRTARRRYTRRKNRICYLQEIFSNEMAKVDDSFFHRLEES | |
| | FLVEEDKRNERHPIFGNIVEEVAYHEKYPTIYHLRKKLADSDEKADLRLVYL | |
| | ALAHIIKFRGHFLIEGDLDSENSDVDKLFIQLVQTYNQLFEENPINASGVDA | |
| | KAILSARLSKSRRLENLIAQLPGEKKNGLFGNLIALSLGLTPNFKSNFDLAE | |
| | DAKLQLSKDTYDDDLDNLLAQIGDQYADLFLAAKNLSDAILLSDILRVSDET | |
| | TKAPLSASMVKRYDEHHQDLTLLKQFIREQLPEKYKEIFFDQSKNGYAGYID | |
| | GGASQEEFYKYLKKILEKIDGSEEFLDKIEREDFLRKQRTFDNGSIPHQIHL | |
| | QELHAIIRRQEKYYPFLKENQEKIEKILTFRIPYYVGPLARGNSRFAWLSRK | |
| | SDETITPWNFEEVVDKEKSAQAFIERMTNFDKNLPDEKVLPKHSLLYEKFTV | |
| | YNELTKVKYVTEGMRKPEFFSAEQKQEIVDLLFKKYRKVTKKQLKEYLFKEF | |
| | DCFDIVEISGVEDRFNASLGTYHDLLKILKDKEFLDNEENEEILEDIILTLT | |
| | LFEDREMIKKRLEKYADLFDKKQLKKLERRRYTGWGRLSAKLINGIRDKQTG | |
| | KTILDYLIADGFANRNFMQLIHDDSLTFKEEIEKAQVIGKGDSLHELIANLA | |
| | GSPAIKKGILQSLKIVDELVKVMGRYAPENIVVEMARENQTTQKGQKNSRER | |
| | MKRIEEGIKELGSQILKEHPVENTQLQNEKLYLYYLQNGRDMYVDQELDINR | |
| | LSDYDVDHIVPQSFLKDDSIDNKVLTRSDKARGKSDNVPSEEVVKKMKNYWR | |
| | QLLNAKLITQRKFDNLTKAERGGLSELDKAGFIKRQLVETRQITKHVAQILD | |
| | SRFNTKYDENGKLIRDVKIITLKSKLVSDERKDFGLYKVREINNYHHAHDAY | |
| | LNAVVGTALIKKYPKLESEFVYGDYKVYDVRKMIAKSEKEIGKATAKYFFYS | |
| | NIMNFFKTDVTLANGEIRKRPLIEVNEETGEIVWDKEKDIATVRKVLSMPQV | |
| | NIVKKTEVQTGGFSKESILPKRDSDKLIARKKDWDTKKYGGFDSPTVAYSVL | |
| | VIADVEKGKAKKLKTVKELVGITIMERSAFEKDPVAFLEDKGYKNIQKDLLI | |
| | KLPKYSLFELENGRKRLLASAGELQKGNELALPQHYVTLLYHAKHYEKLKGK | |
| | PEDNEKKQLYVEEHKHYFDEILDQIEEFAKRYILADANLEKIKELYEKNRDA | |
| | SIEELAENFIHLLTFTALGAPAAFKFFGKTIDRKRYTSTKEILNATLIHQSI | |
| | TGLYETRIDLSKLGGD | |
| CasEnd-270 | MDKKYSIGLDIGTNSVGWAVITDEYKVPSKKFKVLGNTDRHSIKKNLIGALL | 230 |
| | FDSGETAEATRLKRTARRRYTRRKNRICYLQEIFSNEMAKVDDSFFHRLEES | |
| | FLVEEDKKHERHPIFGNIVDEVAYHEKYPTIYHLRKKLVDSTDKADLRLIYL | |
| | ALAHMIKFRGHFLIEGDLNPDNSDVDKLFIQLVQTYNQLFEENPINASGVDA | |
| | KAILSARLSKSRRLENLIAQLPGEKKNGLFGNLIALSLGLTPNFKSNEDLAE | |
| | DAKLQLSKDTYDDDLDNLLAQIGDQYADLFLAAKNLSDAILLSDILRVNTEI | |
| | TKAPLSASMIKRYDEHHQDLTLLKQLVRKQLPEKYKEIFFDQSKNGYAGYID | |
| | GGASQEEFYKYIKPILEKMDGTEELLAKLEREDLLRKQRTFDNGSIPHQIHL | |
| | GELHAILRRQEKYYPFLKENREKIEKILTFRIPYYVGPLARGNSRFAWMTRK | |
| | SDETITPWNFEEVVDKGASAEKFIERMTNFDKNLPEEKVLPKHSLLYEYFTV | |
| | YNELTKVKYVTEGMRKPEFLSGEQKKEIVDLLFKKYRKVTVKQLKEYYFKEF | |
| | ECFDIVEISGVEDRFNASLGTYHDLLKIIKDKDFLDNEKNEEILEDIVLTLT | |
| | LFEDREMIKERLEKYADLFDKKVMKQLKRRRYTGWGRLSRKLINGIRDKQSG | |
| | KTILDFLKADGFANRNFMQLIHDDSLTFKEEIEKAQVGGQGDSLHEHIANLA | |
| | GSPAIKKGILQTVKVVDELVKVMGRHKPENIVIEMARENQTTQKGQKNSRER | |
| | MKRIEEGIKELGSQILKEHPVENTQLQNEKLYLYYLQNGRDMYVDQELDINR | |
| | LSDYDVDHIVPQSFLKDDSIDNKVLTRSDKARGKSDNVPSEEVVKKMKNYWR | |
| | QLLNAKLITQRKFDNLTKAERGGLSELDKAGFIKRQLVETRQITKHVAQILD | |
| | SRMNTKYDENDKLIREVKVITLKSKLVSDFRKDFQFYKVREINNYHHAHDAY | |
| | LNAVVGTALIKKYPKLESEFVYGDYKVYDVRKMIAKSEQEIGKATAKYFFYS | |
| | NIMNFFKTEITLANGEIRKRPLIETNGETGEIVWDKGRDFATVRKVLSMPQV | |
| | NIVKKTEVQTGGFSKESILPKRDSDKLIARKKDWDPKKYGGFDSPTVAYSVL | |
| | VVAKIEKGKAKKLKTVKELLGITIMERSAFEKNPVAFLEDKGYQEVKKELII | |
| | KLPKYSLFELENGRKRMLASAGELQKGNELALPSKYVNFLYLASNYEKLKGK | |
| | PEDNEQKQIYVEQHKEYLDEIIDQISEFSKRVILADANLEKVKSAYEKHREK | |
| | SIEEQAENIIHLFTLTDLGAPAAFKYFDTTIDRKRYTSTKEVLNATLIHQSI | |
| | TGLYETRIDLSQLGGD | |
| CasEnd-271 | MDKPYSIGLDIGTNSVGWAVITDEYKVPSKKFKVLGNTDRHSIKKNLLGALL | 231 |
| | FDSGETAEATRLKRTARRRYTRRKNRIRYLQEIFAEEMNKVDDSFFHRLEES | |
| | FLVEEDKEEERHPIFGNIVDEVAYHEKYPTIYHLRKHLADSTEKADLRLIYL | |
| | ALAHIIKFRGHFLIEGDLNSENTDVQKLFIQFVQVYDNLFEESHLEEETVDA | |
| | EAILTEKLSKSRRLENLIKQFPNEKKNGLFGNLLALSLGLTPNFKSNEDLAE | |
| | DAKLQFSKDTYEEDLENLLAQIGDEYADLFLAAKNLSDAILLSGILTVNTEI | |
| | TKAPLSASMIKRYDEHHQDLTLLKKFVRQQLPEKYKEIFFDESKNGYAGYID | |
| | GGASQEEFYKYIKPILSKLDGTEYFLAKIEREDFLRKQRTFDNGSIPHQIHL | |
| | QELHAILRRQEDFYPFLKENQEKIEKILTFRIPYYVGPLARGNSRFAWLSRK | |
| | SDETITPWNFEEVVDKEASAEAFIERMTNFDKNLPNEKVLPKHSLLYEKFTV | |
| | YNELTKVKYVTEGMRKPAFFSAEQKKEIVDLLFKKNRKVTVKKLKEHLFKEF | |
| | ECFDIVEISGVEDAFNASLGTYHDLLKIIKDKDFLDNEENEDILEDIVLTLT | |
| | LFEDREMIEKRLSKYAHLFDKKVLKKLKRRRYTGWGRLSAKLINGIRDKQTG | |
| | KTILDYLIDDGFANRNFMQLIHDDSLTFKEEIKKAQVIGQGDSLHETIANLA | |
| | GSPAIKKGILQSLKIVDELVKVMGRHNPENIVIEMARENQTTQKGQKNSRER | |
| | LKRLEEAIKKLGSQILKEHPVENTQLQNDKLYLYYLQNGKDMYTGEELDIDR | |
| | LSDYDVDHIIPQSFIKDDSIDNRVLTSSAKARGKSDDVPSEEVVKKMKAYWR | |
| | QLLNAKLISQRKFDNLTKAERGGLSELDKAGFIKRQLVETRQITKHVAQILD | |
| | SRFNTKYDENDKLIREVKIITLKSKLVSDFRKDFGFYKVREINDYHHAHDAY | |
| | LNAVVGTALIKKYPKLESEFVYGDYKVYNSYKMIAKSEQEIGKATAKYFFYS | |
| | NIMNFFKTEITLANGEIRKRPLIETNEETGEIVWDKEKDFATVRKVLSMPQV | |
| | NIVKKTEVQTGGFSKESILPKRNSDKLIARKKDWDTKKYGGFDSPTVAYSVL | |
| | VVADVEKGKAKKLKTVKELVGITIMERSAFEKDPIAFLEDKGYQNIQKENII | |
| | KLPKYSLFELENGRKRLLASAGELQKGNELALPNKYVTLLYHAKNYEKLKGS | |
| | PEDNEKHLEYVEQHRYEFDEILDQISEFSERYILADKNLEKIEELYAENEDK | |
| | SIEELAESFINLFTFTALGAPAAFKFFDKTIDRKRYTSTTEILNATLIHQSI | |
| | TGLYETRIDLSQLGGD | |
| CasEnd-272 | MDKPYSIGLDIGTNSVGWAVITDEYKVPSKKFKVLGNTDRHSIKKNLIGALL | 232 |
| | FDSGETAEATRLKRTARRRYTRRKNRILYLQEIFAEEMNKVDDSFFHRLEES | |
| | FLVEEDKRYERHPIFGNIVDEVAYHENYPTIYHLRKKLADSTEKADLRLIYL | |
| | ALAHIIKFRGHFLIEGDLDSENTDVQKLFKALVQTYNNTFEESHLEEATVDA | |
| | KSILTDKLSKSRRLENLIAQFPNEKKNGLFGNLIALALGLTPNFKSNEDLAE | |
| | DAKLQFSKDTYDEDLENLLTQIGDQYADLFLAAKNLYDAILLSGILTVNTEI | |
| | TKAPLSASMIKRYDEHHQDLTLLKKLVREQLPEKYKEIFFDDTKNGYAGYID | |
| | GGASQEEFYKYIKNILSKLDGTEYFLAKIEREDFLRKQRTFDNGSIPHQIHL | |
| | EELHAILRRQEEFYPFLKENREKIEKILTFRIPYYVGPLARGNSRFAWMSRK | |
| | SDETITPWNFEEVVDKEASAEAFIERMTNNDKNLPNEKVLPKHSLLYEKFTV | |
| | YNELTKVKYITEGMRKPAFLSAEQKKDIVDLLFKKDRKVTVKKLKEFLFKKI | |
| | ECLDSVEISGVEDKFNASLGTYHDLLKIIKDKEFLDNEENEEILEDIVLTLT | |
| | LFEDREMIKQRLAKYAHLFDKKVLKKLKRRRYTGWGRLSRKLINGIRDKQTG | |
| | KTILDYLKDDGFANRNFMQLIHDDSLTFKEEIKKAQVTGQGDSLHEVIANLA | |
| | GSPAIKKGILQSLKIVDELVKVMGRHNPENIVIEMARENQTTQKGQKNSRER | |
| | LKRLEEAIKKLGSKILKEHPVENTQLQNDKLYLYYLQNGRDMYTGEELDIDR | |
| | LSDYDVDHIIPQSFIKDDSIDNRVLTSSAEARGKSDNVPSIEVVKKMKSYWS | |
| | KLLNSKLISQRKFDNLTKAERGGLSELDKAGFIKRQLVETRQITKHVAQILD | |
| | SRFNTKYDENDKLIRKVKIITLKSKLVSDFRKDFGFYKVREINDYHHAHDAY | |
| | LNAVVGTALIKKYPKLESEFVYGDYKVYNSRKMIAKSEQEIGKATAKYFFYS | |
| | NIMNFFKSEITLANGEIRKRPLIETNEETGEIAWNKVKHFATVRKVLSMPQV | |
| | NIVKKTEVQTGGFSKESILPKRNSDKLIARKKDWDTKKYGGFDSPTVAYSVL | |
| | VVADREKGKAKKLKTVKELVGITIMERSTFEKDPIAFLEGKGYQNIQKELII | |
| | KLPKYSLFELENGRKRLLASAGELQKGNELALPQKYVTLLYHASHYEKLKES | |
| | PEDNEKHLEYVEQHREEFDEIFDQISEFSKRYILADKNLEKILSLYDKNRQS | |
| | SIEELAESFINLFTFTALGAPAAFKFFNKTIDRKRYTSTSEILNATLIHQSI | |
| | TGLYETRIDLSQLGGD | |
| CasEnd-273 | MKKPYSIGLDIGTNSVGWAVVTDDYKVPAKKMKVLGNTDKSHIKKNLLGALL | 233 |
| | FDSGNTAEDRRLKRTARRRYTRRRNRILYLQEIFSEEMGKVDDSFFHRLEDS | |
| | FLVPEDKRGERHPIFGNLEEEVKYHENFPTIYHLRKYLADNPEKADLRLVYL | |
| | ALAHIIKFRGHFLIEGKFDTRNNDVQRLFQEFLAVYDNTFENSSLQEQNVQA | |
| | EEILTDKISKSAKKDRVLKLFPNEKSNGRFAEFLKLIVGNQADFKKHFELEE | |
| | KAPLQFSKDTYEEDLEVLLAQIGDEYAELFLSAKKLYDSILLSGILTVTDVS | |
| | TKAPLSASMIQRYNEHQEDLTQLKQFIRQKLPDKYNEVFSDVSKNGYAGYID | |
| | GKTNQEAFYKYLKGLLNKIEGSGYFLDKIEREDFLRKQRTFDNGSIPHQIHL | |
| | QEMRAIIRRQAEFYPFLAENQDKIEKILTFRIPYYVGPLARGKSDFAWLSRK | |
| | SAEKITPWNFDEIVDKESSAEAFINRMTNYDLYLPNQKVLPKHSLLYEKFTV | |
| | YNELTKVKYKTEQMGKTAFFDANMKQEIFDGVFKVYRKVTKDKLMDFLEKEF | |
| | DEFRIVDLTGLDKAFNASYGTYHDLLKILKDKDELDNSKNEKILEDIVLTLT | |
| | LFEDREMIRKRLENYSDLLTKEQLKKLERRHYTGWGRLSAKLIHGIRNKESR | |
| | KTILDYLIDDGNSNRNFMQLINDDALSFKEEIAKAQVIGETDNLNQVVSDIA | |
| | GSPAIKKGILQSLKIVDELVKIMGGHQPENIVVEMARENQFTNQGRRNSQQR | |
| | LKGLTDSIKEFGSQILKEHPVDNSQLQNDRLFLYYLQNGRDMYTGEELDIDY | |
| | LSQYDIDHIIPQAFIKDNSIDNRVLVSSKEARGKSDDVPSKDVVRKMKSYWS | |
| | KLLSAKLITQRKFDNLTKAERGGLTDDDKAGFIKRQLVETRQITKHVARILD | |
| | ERFNTETDENNKKIRQVKIVTLKSNLVSNFRKEFELYKVREINDYHHAHDAY | |
| | LNAVVGKALLGKYPQLEPEFVYGDYPKFNSHKFVAKDAKEEKKATAKKFFYS | |
| | NIMNFFKSDDKLADGQIVERPMVERNDENGEIIWDKTKHISTVKKVLSYPQV | |
| | NIVKKVEEQTGGFSKESILPKGNSDKLIPRKTKWDTKKYGGFDSPIVAYSVL | |
| | VIADIEKGKSKKLKTVKALVGITIMEKMTFEKDPVAFLERKGYRNIQEENII | |
| | KLPKYSLFELENGRKRLLASARELQKGNEIVLPNHLVTLLYHAKNIHKVDEK | |
| | AEDIPKHLDYVDKHRAEFKELLDVVSNFSKKYTLAEGNLEKIKELYAQNNSA | |
| | DIKELASSFINLLTFTALGAPATFKFFDKNIDRKRYTSTTEILNATLIHQSI | |
| | TGLYETRIDLSKLGGD | |
| CasEnd-274 | MKKPYSIGLDIGTNSVGWAVVTDEYKVPSKKFKVLGNTDRQSIKKNLLGALL | 234 |
| | FDSGETAEATRLKRTARRRYTRRKNRILYLQEIFAEEMNKVDESFFHRLEES | |
| | FLVEEDKRGERHPIFGNIVEEVAYHEKYPTIYHLRKHLADSTEKADLRLVYL | |
| | ALAHIIKFRGHFLIEGDLNSENTDVQKLFKDFVEVYDKTFEESHLSEETVDA | |
| | ESILTEKVSKSRRLENLIKQFPNEKKNGLFGNLLALSLGLQPNFKTNFQLSE | |
| | DAKLQFSKDTYEEDLENLLGQIGDEYADLFTAAKNLYDAILLSGILTVNDES | |
| | TKAPLSASMVKRYDEHHQDLTKLKAFIRQNLPEKYKEIFFDKSKNGYAGYID | |
| | GGAKQEEFYKYLKNILSKIDGSEYFLDKIEREDFLRKQRTFDNGSIPHQIHL | |
| | QELKAILRRQGEYYPFLKENQEKIEKILTFRIPYYVGPLARGNSRFAWASRK | |
| | SDETITPWNFDEVVDKEKSAEAFIERMTNNDKNLPEEKVLPKHSLLYEKFTV | |
| | YNELTKVKYVTEQMGKAEFFDANMKQEIFDGVFKKYRKVTKKKLLDFLDKEF | |
| | DEFRIVDISGVEKAFNASLGTYHDLKKILKDKSFLDNPENEKILEDIILTLT | |
| | LFEDREMIRKRLEKYADLFTKKQLKKLERRRYTGWGRLSAKLINGIRDKQSG | |
| | KTILDYLIDDGYANRNFMQLIHDDSLSFKEEIKKAQVIGESDSLHEVIADLA | |
| | GSPAIKKGILQSLKIVDELVKVMGRYNPENIVIEMARENQTTQKGQRNSRER | |
| | LKRLEESIKELGSDILKEHPVENTQLQNDKLYLYYLQNGKDMYTGEELDIDN | |
| | LSDYDVDHIIPQSFIKDDSIDNRVLTSSAKARGKSDDVPSEEVVRKMKSFWS | |
| | KLLKAGLISQRKFDNLTKAERGGLTELDKAGFIKRQLVETRQITKHVAQILD | |
| | ERFNTERDENNKLIRDVKIITLKSKLVSNFRKEFEFYKVREINDYHHAHDAY | |
| | LNAVVGKALIKKYPKLESEFVYGDYPVYNSYKMIAKSEQEIGKATAKYFFYS | |
| | NIMNFFKTEITLANGEIRKRPLIETNGETGEIVWDKGRDFATVRKVLSMPQV | |
| | NIVKKTEVQTGGFSKESILPKRNSDKLIARKKDWDPKKYGGFDSPTVAYSVL | |
| | VVAKVEKGKSKKLKSVKELLGITIMERSSFEKNPIDFLEAKGYKEVKKDLII | |
| | KLPKYSLFELENGRKRMLASAGELQKGNELALPSKYVNFLYLASHYEKLKGS | |
| | PEDNEQKQLFVEQHKHYLDEIIEQISEFSKRVILADANLDKVLSAYNKHRDK | |
| | PIREQAENIIHLFTLTNLGAPAAFKYFDTTIDRKRYTSTKEVLDATLIHQSI | |
| | TGLYETRIDLSQLGGD | |
| CasEnd-275 | MDKSYSIGLDIGTNSVGWAVITDEYKVPSKKFKVLGNTDRKSIKKNLIGALL | 235 |
| | FDSGETAEATRLKRTARRRYTRRKNRICYLQEIFSNEMAKVDDSFFHRLEES | |
| | FLVEEDKRFERHPIFGNIVEEVAYHEKYPTIYHLRKKLVDSDEKADLRLIYL | |
| | ALAHMIKFRGHFLIEGDLNSDNSDVDKLFIQLVQTYNQLFEENPINASGVDA | |
| | KAILSARLSKSRRLENLIAQLPGEKKNGLFGNLIALSLGLTPNFKSNEDLAE | |
| | DAKLQLSKDTYDDDLDNLLAQIGDQYADLFLAAKNLSDAILLSDILRVNTEI | |
| | TKAPLSASMIKRYDEHHQDLTLLKALVRQQLPEKYKEIFFDQSKNGYAGYID | |
| | GGASQEEFYKFIKPILEKMDGTEELLVKLNREDLLRKQRTFDNGSIPHQIHL | |
| | GELHAILRRQEDFYPFLKDNREKIEKILTFRIPYYVGPLARGNSRFAWMTRK | |
| | SEETITPWNFEEVVDKGASAQSFIERMTNFDKNLPNEKVLPKHSLLYEYFTV | |
| | YNELTKVKYVTEGMRKPAFLSGEQKKAIVDLLFKTNRKVTVKQLKEDYFKKI | |
| | ECFDSVEISGVEDRFNASLGTYHDLLKIIKDKDFLDNEENEDILEDIVLTLT | |
| | LFEDREMIEERLKTYAHLFDDKVMKQLKRRRYTGWGRLSRKLINGIRDKQSG | |
| | KTILDFLKSDGFANRNFMQLIHDDSLTFKEDIQKAQVSGQGESLHEHIANLA | |
| | GSPAIKKGILQTVKVVDELVKVMGRHKPKNIVIEMARENQTTQKGQKNSRER | |
| | MKRIEEGIKELGSQILKEHPVENTQLQNEKLYLYYLQNGRDMYVDQELDINR | |
| | LSDYDVDHIVPQSFLKDDSIDNKVLTRSDKARGKSDNVPSEEVVKKMKNYWR | |
| | QLLNAKLITQRKFDNLTKAERGGLSELDKAGFIKRQLVETRQITKHVAQILD | |
| | SRMNTEYDENDKLIRDVKVITLKSKLVSDFRKDFGFYKVREINNYHHAHDAY | |
| | LNAVVGTALIKKYPKLESEFVYGDYPVYDVRKMIAKSSQEIGKATAKYFFYS | |
| | NIMNFFKSEITLANGTIRKRPLIESNEETGEIVWDKEKDFATVKKVLSMPQV | |
| | NIVKKTEVQTGGFSKESILPKRDSDKLIARKKDWDPRKYGGFDSPTVAYSVL | |
| | VVAKIEKGKTKKLKTVKELLGITIMERSAFEKDPVAFLEDKGYKDVKKNLII | |
| | KLPKYSLFELENGRKRMLASAGELQKGNELALPSHYVNFLYLASRYEKLKGK | |
| | EEDEKQKQIYVEKHLEYLKEIIDQISEFSERVILADANLEKVKKAYEEHSEK | |
| | SIEEQAENIIHLFTLTALGAPAAFKYFNVDIDRKRYTSTKEVLNATLIHQSI | |
| | TGLYETRIDLSKLGGD | |
| CasEnd-276 | MDKKYSIGLDIGTNSVGWAVITDEYKVPSKKFKVLGNTDRQSIKKNLIGALL | 236 |
| | FDSGETAEATRLKRTARRRYTRRKNRICYLQEIFSEEMSKVDDSFFHRLEES | |
| | FLVEEDKRHERHPIFGNIVDEVAYHEKYPTIYHLRKKLVDSTDKADLRLIYL | |
| | ALAHMIKFRGHFLIEGDLNPDNSDVDKLFIQLVQTYNQTFEENPISAETVDA | |
| | EAILTERLSKSRRLENLIAQLPNEKKNGLFGNLIALSLGLTPNFKSNFELSE | |
| | DAKLQLSKDTYDEDLENLLAQIGDQYADLFTAAKNLYDAILLSDILRVNTLI | |
| | TKAPLSASMIKRYDEHHQDLTLLKALVRQQLPEKYKEIFFDESKNGYAGYID | |
| | GGASQEEFYKFIKPILSKMDGTEYLLVKLEREDLLRKQRTFDNGSIPHQIHL | |
| | QELHAILRRQEDFYPFLKDNREKIEKILTFRIPYYVGPLARGNSRFAWMTRK | |
| | SDETITPWNFEEVVDEGASAQSFIERMTNFDKNLPNEKVLPKHSLLYEYFTV | |
| | YNELTKVKYVTEGMRKPAFLSGEQKKEIVDLLFKTNRKVTVKQLKEDLENEI | |
| | DCFDSVDISGVEDRFNASLGTYHDLLKIIKDKDFLDNEENEDILEDIVLTLT | |
| | LFEDREMIEKRLKTYANLFDKKVMKQLKRRRYTGWGRLSRKLINGIRDKQSG | |
| | KTILDFLKSDGFANRNFMQLIHDDSLTFKEDIQKAQVSGQTDSLHEQIANLA | |
| | GSPAIKKGILQTLKVVDELVKVMGRYKPENIVIEMARENQTTQKGQKNSRER | |
| | MKRIEEGIKELGSKILKEHPVENTQLQNEKLYLYYLQNGRDMYTDQELDINR | |
| | LSDYDVDHIVPQSFLKDDSIDNRVLTSSKKARGKSDDVPSEEVVKKMKSYWR | |
| | QLLNAGLITQRKFDNLTKAERGGLSELDKAGFIKRQLVETRQITKHVAQILD | |
| | SRMNTKYDENSKLIRDVKVITLKSKLVSDFRKDFQFYKVREINNYHHAHDAY | |
| | LNAVVGTALIKKYPKLESEFVYGDYKVYDSYRMVAKSDKEIGKATAKYFFYS | |
| | NIMNFFKSDVKLADGRIRERPQIETNEETGEIAWDKGRDFATVRKVLSMPQV | |
| | NIVKKTEVQTGGFSKESILPKRNSDKLIARKKDWDPKKYGGFDSPTVAYSVL | |
| | VVADVEKGKAKKLKSVKELLGITIMERSSFEKNPVDFLEAKGYQNIQEDKII | |
| | KLPKYSLFELENGRKRLLASAGELQKGNELALPQKYVTFLYHAKHYEKLKGK | |
| | PEDLEKHQLFVEQHRHYFDEILEQIIEFSERYILADKNLEKIKELFAEHEEA | |
| | SIREQASNIINLETFTNLGAPAAFKYFDTDIDRKRYTSTTEILNATLIHQSI | |
| | TGLYETRIDLSQLGGD | |
| CasEnd-277 | MDKKYSIGLDIGTNSVGWAVITDEYKVPSKKFKVLGNTDRHSIKKNLIGALL | 237 |
| | FDSGETAEATRLKRTARRRYTRRKNRICYLQEIFSNEMAKVDDSFFHRLEES | |
| | FLVEEDKKGERHPIFGNIVDEVAYHEKYPTIYHLRKKLADSTEKADLRLIYL | |
| | ALAHIIKFRGHFLIEGDLNSENTDVQKLFKQLVQTYDQTFEESHLNEETVDA | |
| | KSILTEKLSKSRRLENLIKQFPNEKKNGLFGNLIALSLGLQPNFKSNEDLSE | |
| | DAKLQFSKDTYDEDLENLLGQIGDQYADLFVAAKNLYDAILLSGILTVNDES | |
| | TKAPLSASMIKRYDEHHQDLTLLKAFVRQQLPEKYKEIFFDETKNGYAGYID | |
| | GGASQEEFYKYIKPILEKMDGSEYFLEKIEREDFLRKQRTFDNGSIPHQIHL | |
| | QELHAILRRQEEYYPFLKENQEKIEKILTFRIPYYVGPLARGNSRFAWMTRK | |
| | SDETITPWNFDEVVDKEASAQAFIERMTNFDKNLPEEKVLPKHSLLYEKFTV | |
| | YNELTKVKYVTEQMGKPQFFDANLKQEIFDGLFKKNRKVTKKKLLDFLDKEF | |
| | DEFRIVDISGVEDAFNASLGTYHDLLKIIKDKEFLDNEENEDILEDIVLTLT | |
| | LFEDREMIEKRLSKYADLFDKKVLKQLERRRYTGWGRLSAKLINGIRDKQSG | |
| | KTILDYLIDDGFANRNFMQLIHDDSLTFKEEIKKAQVIGQGDSLHEHIANLA | |
| | GSPAIKKGILQTVKVVDELVKVMGRHKPENIVIEMARENQTTQKGQRNSRER | |
| | LKRLEEAIKELGSKILKEHPVENTQLQNDKLYLYYLQNGKDMYTGEELDIDR | |
| | LSDYDVDHIIPQSFIKDDSIDNRVLTSSAKARGKSDNVPSEEVVRKMKSEWS | |
| | KLLNAKLISQRKFDNLTKAERGGLSELDKAGFIKRQLVETRQITKHVAQILD | |
| | SRMNTKYDENDKLIREVKVITLKSKLVSDFRKDFQFYKVREINNYHHAHDAY | |
| | LNAVVGTALIKKYPKLESEFVYGDYKVYDVRKMIAKSEQEIGKATAKYFFYS | |
| | NIMNFFKTEITLANGEIRKRPLIETNGETGEIVWDKGRDFATVRKVLSMPQV | |
| | NIVKKTEVQTGGFSKESILPKRDSDKLIARKKDWDTKKYGGFDSPTVAYSVL | |
| | VVAKIEKGKAKKLKTVKELVGITIMERSAFEKNPVAFLEDKGYQNIQEDLII | |
| | KLPKYSLFELENGRKRLLASAGELQKGNELALPQKYVTLLYHAKHYEKLKGK | |
| | PEDEEKHLEYVEQHRSEFDEILEQISEFSERYILADKNLEKILELYEQFENK | |
| | SIEELASSFINLLTLTALGAPAAFKFFGETIDRKRYTSTKEILNATLIHQSI | |
| | TGLYETRIDLSKLGGD | |
| CasEnd-278 | MKKKYSIGLDIGTNSVGWAVITDEYKVPSKKFKVLGNTDRQSIKKNLLGALL | 238 |
| | FDSGETAEATRLKRTARRRYTRRKNRIRYLQEIFSEEMSKVDDSFFQRLEES | |
| | FLVEEDKRHERHPIFGNIVEEVAYHEKYPTIYHLRKKLADSTQKADLRLIYL | |
| | ALAHMIKFRGHFLIEGDLNPENSDVQKLFIQLVQTYNQLFEENPINESGVDA | |
| | KAILSAKLSKSRRLENLIAQFPGEKKNGLFGNLIALSLGLTPNFKSNFDLAE | |
| | DAKLQLSKDTYDEDLDNLLAQIGDQYADLFAAAKNLSDAILLSGILTVNDEI | |
| | TKAPLSASMIKRYDEHHQDLTLLKNLVREQLPEKYKEIFFDDSKNGYAGYID | |
| | GGASQEEFYKFIKPILEKMDGTEYLLAKINREDFLRKQRTFDNGSIPHQIHL | |
| | GELHAILRRQEEFYPFLKENREKIEKILTFRIPYYVGPLARGNSRFAWMTRK | |
| | SEETITPWNFEEVVDKGASAQAFIERMTNFDKNLPTEKVLPKHSLLYEYFTV | |
| | YNELTKVKYVTEGMRKPEFLSSNQKKEIVDLLFKKSRKVTVKQLKEDYFKKI | |
| | ECFDSVEISGVEDRFNASLGTYHDLLKIIKDKDFLDNEENEEILEDIVLTLT | |
| | LFEDREMIEERLKKYANLFDKKVLKQLKRRRYTGWGRLSRKLINGIKDKQSG | |
| | KTILDFLKSDGFANRNFMQLIHDDSLTFKEEIQKAQVSGQGESLHEVIANLA | |
| | GSPAIKKGILQSIKIVDEIVKVMGRHKPENIVIEMARENQTTQKGQKNSRER | |
| | MKRIEEGIKELGSQILKEHPVENTQLQNEKLYLYYLQNGRDMYVDQELDINR | |
| | LSDYDVDHIVPQSFLKDDSIDNKVLTRSDKARGKSDNVPSEEVVKKMKNYWR | |
| | QLLNAKLITQRKFDNLTKAERGGLSELDKAGFIKRQLVETRQITKHVAQILD | |
| | SRFNTKRDENDKLIREVKIITLKSKLVSDFRKDFQFYKVREINNYHHAHDAY | |
| | LNAVVGTALIKKYPKLESEFVYGDYKVYDVRKKIAKSEQEIGKATAKYFFYS | |
| | NIMNFFKSEITLANGEIRKRPLIETNEETGEIVWNKEKDFATVKKVLSMPQV | |
| | NIVKKTEVQTGGFSKESILPKRNSDKLIARKKDWDTKKYGGFDSPTVAYSVL | |
| | VVAKVEKGKAKKLKTVKELVGITIMERSSFEKDPVAFLEAKGYKEIQKDLII | |
| | KLPKYSLFELENGRKRLLASAGELQKGNELALPQKYVTFLYLAKHYEKLKGK | |
| | PEDLEKNLEYVEEHRDYFKEILEQIKEFSERYILADANLEKIKELYNEHEDY | |
| | EISELAENFIHLFTLTSLGAPAAFKFFDTTIDRKRYTSTKEILNATLIHQSI | |
| | TGLYETRIDLSQLGGD | |
| CasEnd-279 | MDKKYSIGLDIGTNSVGWAVITDEYKVPSKKFKVLGNTDRHSIKKNLIGALL | 239 |
| | FDSGETAEATRLKRTARRRYTRRKNRICYLQEIFSNEMAKVDDSFFHRLEES | |
| | FLVEEDKKDERHPIFGNIVDEVAYHEKYPTIYHLRKHLADSTEKADLRLVYL | |
| | ALAHIIKFRGHFLIEGDLNSENTDVQKLFKQLVQTYNRTFEESPLSEETVDA | |
| | EAILTEKLSKSRKLENLIAQFPNEKKNGLFGNLIALSLGLQPNFKSNFKLSE | |
| | DAKLQFSKDTYDEDLENLLGQIGDEYADLFLAAKNLYDAILLSGILTVNDES | |
| | TKAPLSASMIKRYDEHHQDLTLLKKFVREQLPEKYKEIFFDETKNGYAGYID | |
| | GGASQEEFYKYIKPLLEKVDGAEYFLEKIEREDFLRKQRTFDNGSIPHQIHL | |
| | GELHAILRRQEEFYPFLKENQEKIEKILTFRIPYYVGPLARGNSRFAWMSRK | |
| | SDETITPWNFEEVVDKEASAEAFIERMTNFDKNLPEEKVLPKHSLLYEKFTV | |
| | YNELTKVKYVTEGMGKPEFFSANQKQEIFDGLFKKNRKVTKKKLKEFLFKEF | |
| | EEFRIVDISGVEDAFNASLGTYHDLLKIIKDKDFLDNEENEDILEDIILTLT | |
| | LFEDREMIEKRLQKYADLFDKKQLKKLERRRYTGWGRLSKKLINGIRDKQSG | |
| | KTILDFLIDDGFANRNFMQLIHDDSLSFKEEIKKAQVIGQGDSLHEHIANLA | |
| | GSPAIKKGILQTVKVVDELVKVMGRHKPENIVIEMARENQTTQKGQKNSRER | |
| | MKRIEEGIKELGSQILKEHPVENTQLQNEKLYLYYLQNGRDMYVDQELDINR | |
| | LSDYDVDHIVPQSFLKDDSIDNKVLTRSDKARGKSDNVPSEEVVKKMKNYWR | |
| | QLLNAKLITQRKFDNLTKAERGGLSELDKAGFIKRQLVETRQITKHVAQILD | |
| | SRMNTKYDENDKLIREVKVITLKSKLVSDFRKDFQFYKVREINNYHHAHDAY | |
| | LNAVVGTALIKKYPKLESEFVYGDYKVYDVRKMIAKSEQEIGKATAKYFFYS | |
| | NIMNFFKTEITLANGEIRKRPLIETNGETGEIVWDKGRDFATVRKVLSMPQV | |
| | NIVKKTEVQTGGFSKESILPKRDSDKLIARKKDWDTKKYGGFDSPTVAYSVL | |
| | VVADIEKGKAKKLKTVKELVGITIMERSRFEKNPIAFLEDKGYQNIQEDKII | |
| | KLPKYSLFELENGRKRLLASAGELQKGNELALPQKYVTLLYHAKNYEKLKEK | |
| | PEDIEKHLEYVEKHRDEFKEILSQIIEFSKRYILADKNLEKIKELFNQNENS | |
| | SISELASSFINLLTFTSLGAPAAFKFFGSTIDRKRYTSTKEILNATLIHQSI | |
| | TGLYETRIDLSKLGGD | |
| CasEnd-280 | MDKPYSIGLDIGTNSVGWAVVTDEYKVPSKKFKVLGNTDRHSIKKNLLGALL | 240 |
| | FDSGETAEATRLKRTARRRYTRRKNRIRYLQEIFAEEMNKVDDSFFHRLEES | |
| | FLVEEDKRNERHPIFGNIVEEVAYHEKYPTIYHLRKHLADSTEKADLRLIYL | |
| | ALAHIIKFRGHFLIEGDLDSENTDVQKLFSALVQVYNQLQEESPLSEETVDA | |
| | EAILTAKISKSRRLENLIALFPGEKKNGLFGNLIALSLGLTPNFKSNFELSE | |
| | DAKLQFSKDTYDEDLENLLAQIGDQYADLFLAAKNLYDAILLSGILTVKTEI | |
| | TKAPLSASMVKRYDEHHQDLTLLKDFIRQQLPEKYKEIFFDDSKNGYAGYID | |
| | GGAKQEEFYKYIKPILEKLDGSEDFLDKIEREDFLRKQRTFDNGSIPHQIHL | |
| | EELHAILRRQEEFYPFLKENQEKIEKILTFRIPYYVGPLARGNSRFAWMSRK | |
| | SDETITPWNFEEVVDKEASAQLFIERMTNFDKNLPNEKVLPKHSLLYEMFTV | |
| | YNELTKVKYVTEGMRKPAFFSSEQKKEIVDLLFKKYRKVTVKQLKNFLFKEF | |
| | ECFDIVEISGVEDRFNASLGTYHDLLKIIKDKDFLDNEENEDILEDIVLTLT | |
| | LFEDREMIEERLEKYADIFDKNVLKKLKRRRYTGWGRLSGKLINGIRDKQSG | |
| | KTILDYLIDDGFANRNFMQLIHDDSLTFKEEIAKAQVIGDTDSLHETIANLA | |
| | GSPAIKKGILQSLKIVDELVKVMGRHKPENIVIEMARENQTTQKGQKNSRER | |
| | LKRLEEAIKELGSKILKEHPVENTQLQNDKLYLYYLQNGRDMYTGEELDIDR | |
| | LSDYDVDHIIPQSFIKDDSIDNKVLTSSAKARGKSDNVPSIEVVKKMKPYWQ | |
| | QLLDAKLISQRKFDNLTKAERGGLSELDKAGFIKRQLVETRQITKHVAQILD | |
| | SRFNTKYDENDKLIRDVKIITLKSKLVSDFRKDFGFYKVREINDYHHAHDAY | |
| | LNAVVGTALIKKYPKLESEFVYGDYKVYNSRKMIAKSEQEIGKATAKYFFYS | |
| | NIMNFFKKDITLANGEIRKRPLIETNEETGEIVWDKEKDFATVKKVLSMPQV | |
| | NIVKKTEVQTGGFSKESILPKRNSDKLIARKKDWDTTKYGGFDSPTVAYSVL | |
| | VIAEIEKGKAKKLKTVKELVGITIMERSSFEKNPIAFLEAKGYKNIRKDLII | |
| | KLPKYSLFELENGRKRLLASAGELQKGNELALPQKYVTLLYHASHYEKLKES | |
| | PEDNPPKFEYVVQHKHEFDEILDQIEEFSERYILADKNLEKINELYEENRDA | |
| | SIEELAESFINLLTFTALGAPAAFKFFGQTIDRKRYTSTTEVLNATLIHQSI | |
| | TGLYETRIDLSQLGGD | |
| CasEnd-281 | MKKKYSIGLDIGTNSVGWAVITDEYKVPSKKFKVLGNTDRHSIKKNLLGALL | 241 |
| | FDSGETAEATRLKRTARRRYTRRKNRICYLQEIFSEEMSKVDDSFFHRLEES | |
| | FLVEEDKKGERHPIFGNIVDEVAYHEKYPTIYHLRKKLADSPEKADLRLIYL | |
| | ALAHMIKFRGHFLIEGDLNPENTDVDKLFIQLVQTYNQLFEENAIDASGVDA | |
| | KDILSAKLSKSRRLENLIAQFPGEKKNGLFGNLIALSLGLTPNFKSNEDLAE | |
| | DAKLQLSKDTYDEDLDNLLAQIGDQYADLFLAAKNLSDAILLSGILTVNDES | |
| | TKAPLSASMIKRYDEHHQDLTLLKALVREQLPEKYKEIFFDESKNGYAGYID | |
| | GGASQEEFYKYIKPILEKMDGTEELLAKLNREDFLRKQRTEDNGSIPHQIHL | |
| | GELHAILRRQEDFYPFLKENREKIEKILTFRIPYYVGPLARGNSRFAWMTRK | |
| | SEETITPWNFEEVVDKGASAQAFIERMTNFDKNLPTEKVLPKHSLLYEYFTV | |
| | YNELTKVKYVTEGMRKPEFFSGNQKEAIVDLLFKTNRKVTVKQLKEDYFKKI | |
| | DCFDIVEISGVEDRFNASLGTYHDLLKIIKDKDFLDNEENEDILEDIVLTLT | |
| | LFEDREMIEQRLKKYAHLFDKKVLKQLKRRRYTGWGRLSRKLINGIRDKQSG | |
| | KTILDFLKADGFANRNFMQLIHDDSLTFKEEIQKAQVSGQTDSLHETIANLA | |
| | GSPAIKKGILQSVKIVDELVKVMGRHKPENIVIEMARENQTTQKGQKNSRER | |
| | MKRIEEGIKELGSQILKEHPVENTQLQNEKLYLYYLQNGRDMYVDQELDINR | |
| | LSDYDVDHIVPQSFLKDDSIDNKVLTRSDKARGKSDNVPSEEVVKKMKNYWR | |
| | QLLNAKLITQRKFDNLTKAERGGLSELDKAGFIKRQLVETRQITKHVAQILD | |
| | SRMNTERDENDKLIREVKIITLKSKLVSDFRKDFQFYKVREINDYHHAHDAY | |
| | LNAVVGTALIKKYPKLESEFVYGDYKVYDVRKMISKSEQEIGKATAKYFFYS | |
| | NIMNFFKTEITLANGEIRKRPLIETNEETGEIVWDKGKDFATVRKVLSMPQV | |
| | NIVKKTEVQTGGFSKESILPKRNSDKLIARKKDWDTKKYGGFDSPTVAYSVL | |
| | VIAKVEKGKAKKLKSVKELVGITIMERSSFEKDPVAFLEDKGYKNVQKDLII | |
| | KLPKYSLFELENGRKRLLASAGELQKGNELALPSKYVTLLYHAKKYEKLKEK | |
| | EEDNEKKQEYVEQHRYEFDEIFEQISEFSKRYILADKNLDKILELFSNERDS | |
| | SISELAENFIHLFTFTSLGAPAAFKFFDKTIDRKRYTSTKEILDATLIHQSI | |
| | TGLYETRIDLSQLGGD | |
| CasEnd-282 | MKKKYSIGLDIGTNSVGWAVITDEYKVPSKKFKVLGNTDRQSIKKNLIGALL | 242 |
| | FDSGETAEATRLKRTARRRYTRRKNRIRYLQEIFAEEMAKVDDSFFHRLEES | |
| | FLVEEDKKHERHPIFGNIVDEVAYHEKYPTIYHLRKKLVDSTEKADLRLIYL | |
| | ALAHMIKFRGHFLIEGDLNSDNSDVQKLFIQLVQTYNQLFEENPINESGVDA | |
| | KAILSARLSKSRRLENLIAQFPNEKKNGLFGNLIALSLGLTPNFKSNEDLAE | |
| | DAKLQLSKDTYDDDLDNLLAQIGDQYADLFLAAKNLSDAILLSDILRVNTEI | |
| | TKAPLSASMIKRYDEHHQDLTLLKALVRQQLPEKYKEIFFDKSKNGYAGYID | |
| | GGASQEEFYKFIKPILEKMDGTEELLAKLNREDLLRKQRTFDNGSIPHQIHL | |
| | GELHAILRRQEEFYPFLKENREKIEKILTFRIPYYVGPLARGNSRFAWMTRK | |
| | SEETITPWNFEEVVDKGASAQSFIERMTNFDKNLPNEKVLPKHSLLYEYFTV | |
| | YNELTKVKYVTEGMGKPEFLSGEQKKEIVDLLFKKNRKVTVKQLKEDYFKEI | |
| | ECFDSVEISGVEDRFNASLGTYHDLLKIIKDKDFLDNEENEDILEDIVLTLT | |
| | LFEDREMIEERLKKYANLFDKKVMKQLKRRRYTGWGRLSRKLINGIRDKQSG | |
| | KTILDFLKSDGFANRNFMQLIHDDSLTFKEAIKKAQVSGQGESLHEQIANLA | |
| | GSPAIKKGILQTVKVVDELVKVMGRHKPENIVIEMARENQTTQKGQKNSRER | |
| | MKRIEEGIKELGSQILKEHPVENTQLQNEKLYLYYLQNGRDMYTGQELDINR | |
| | LSDYDVDHIVPQSFLKDDSIDNKVLTRSEKARGKSDNVPSEEVVKKMKNYWR | |
| | QLLNAKLITQRKFDNLTKAERGGLSELDKAGFIKRQLVETRQITKHVAQILD | |
| | SRMNTKRDENDKLIRDVKVITLKSKLVSDFRKDFQFYKVREINNYHHAHDAY | |
| | LNAVVGTALIKKYPKLESEFVYGDYKVYDVRKMIAKSEQEIGKATAKYFFYS | |
| | NIMNFFKTEIKLANGEIRKRPVIETNEETGEIVWDKERDFATVRKVLSMPQV | |
| | NIVKKTEVQTGGFSKESILPKRESDKLIARKKDWDPKKYGGFDSPTVAYSVL | |
| | VVAKVEKGKTKKLKTVKELLGITIMERSSFEKDPVDFLEDKGYKEVKKDLII | |
| | KLPKYSLFELENGRKRMLASAGELQKGNELALPSKYVNFLYLASHYEKLKGS | |
| | PEDEEQKRLYVEQHKDYLDEIIDQISEFSERVILADKNLEKVLSAYNEFRDK | |
| | SINEQAENIIHLFTLTNLGAPAAFKYFDTTIDRKRYTSTKEVLNATLIHQSI | |
| | TGLYETRIDLSQLGGD | |
| CasEnd-283 | MDKKYSIGLDIGTNSVGWAVVTDDYKVPSKKFKVLGNTDRKSIKKNLLGALL | 243 |
| | FDSGETAEATRLKRTARRRYTRRKNRICYLQEIFSNEMAKVDESFFHRLEES | |
| | FLVEEDKRGERHPIFGNIVEEVAYHEKFPTIYHLRKKLADSPEKADLRLVYL | |
| | ALAHIIKFRGHFLIEGDLKSENTDVDKLFIQLVQTYNQLFEENPINASGVDA | |
| | KAILSARLSKSRRLENLIAQLPGEKKNGLFGNLIALSLGLTPNFKSNEDLAE | |
| | DAKLQLSKDTYDDDLDNLLAQIGDQYADLFLAAKNLSDAILLSDILRVSDES | |
| | TKAPLSASMVKRYEEHHKDLTLLKQFIREQLPEKYKEIFFDASKNGYAGYID | |
| | GGASQEEFYKYLKKILEKIDGSEEFLDKIEREDFLRKQRTFDNGSIPHQIHL | |
| | QELHAILRRQEEYYPFLKENKEKIEQILTFRIPYYVGPLARGNSRFAWLSRK | |
| | SDETITPWNFDEVVDKEASAEAFIERMTNFDKNLPNEKVLPKHSLLYEKFTV | |
| | YNELTKVKYVTEGGKKPEFFDANQKQEIFDLLFKKYRKVTKKQLKDFLFKEF | |
| | DEFRIVDISGVEDRFNASLGTYHDLLKIIKDKDFLDNEENEEILEDIILTLT | |
| | LFEDREMIKKRLEKYADLFDKKQLKKLERRRYTGWGRLSAKLINGIRDKQTG | |
| | KTILDYLIDDGFANRNFMQLIHDDNLSFKEEIAKAQVIGQTESLHETIANLA | |
| | GSPAIKKGILQSLKIVDELVKVMGRYEPENIVVEMARENQTTAKGQKNSRER | |
| | MKRIEEGIKELGSQILKEHPVENTQLQNEKLYLYYLQNGRDMYVDQELDINR | |
| | LSDYDVDHIVPQSFLKDDSIDNKVLTRSDKARGKSDNVPSEEVVKKMKNYWR | |
| | QLLNAKLITQRKFDNLTKAERGGLTEDDKAGFIKRQLVETRQITKHVAQILD | |
| | SRFNTEYDDNGKLIRDVKIITLKSKLVSQFRKDFELYKVREINDYHHAHDAY | |
| | LNAVVGTALIKKYPKLESEFVYGDYPKYNLRKMIAKSRKEIGKATAKMFFYS | |
| | NIMNFFKTDIKLADGTVRERPLIEVNEETGEIVWDKEKHIATVKKVLSMPQV | |
| | NIVKKTEVQTGGFSKESILPKRDSDKLIARKKDWDTSKYGGEDSPTVAYSVL | |
| | VIADVEKGKAKKLKTVKELVGITIMERSAFEKDPIAFLEDKGYQNIQKDNLI | |
| | KLPKYSLFELENGRKRLLASAGELQKGNELALPNHLVILLYHAKHIEKLKGS | |
| | PEDNEESLNYVEEHREEFDEILDQISEFSKRYILADANLEKLKELYEKNKEA | |
| | SIEELASSFINLLTFTALGAPAAFKFFGKTIDRKRYTSTKEILNATLIHQSI | |
| | TGLYETRIDLSKLGGD | |
| CasEnd-284 | MDKPYSIGLDIGTNSVGWAVVTDEYKVPSKKFKVLGNTDRKSIKKNLLGALL | 244 |
| | FDSGETAEATRLKRTARRRYTRRKNRILYLQEIFAEEMAKVDDNFFHRLEES | |
| | FLVEEDKRGERHPIFGNIVEEVAYHEKYPTIYHLRKHLADSPEKADLRLVYL | |
| | ALAHIIKFRGHFLIEGDLDAENTDVQELFQELLEVYDRTFEESHLQEEKVDA | |
| | EEILTEKISKSRRLENLLALFPGEKKNGLFGELLKLIVGLTPNFKSNFGLEE | |
| | DAKLQFSKDTYDEDLEELLGQIGDEYADLFVAAKKLYDAILLSGILTVKDSS | |
| | TKAPLSASMVQRYDEHHQDLTLLKKFIRKNLPEKYKEIFFDQSKNGYAGYID | |
| | GGASQEDFYKYLKKLLEKIDGSEYFLDKIEREDFLRKQRTFDNGSIPHQIHL | |
| | QELHAIIRRQEKYYPFLKENQEKIEKILTFRIPYYVGPLARGNSRFAWLSRK | |
| | SDETITPWNFDEVVDKEASAEAFIERMTNFDKNLPDEKVLPKHSLLYEKFTV | |
| | YNELTKVKYVTEGGKKPEFFDANMKQEIFDGVFKKYRKVTKKQLLDFLEKEF | |
| | DEFRIVEISGVEDRFNASLGTYHDLKKILGDKDFLDNPDNEEILEDIILTLT | |
| | LFEDREMIKKRLEKYEDLLDKEQIKKLERRRYTGWGRLSAKLINGIRDKQTG | |
| | KTILDYLIDDGYANRNFMQLIHDDSLSFKEEIAKAQVIGETESLHEVIANLA | |
| | GSPAIKKGILQSLKIVDELVKVMGRHEPENIVVEMARENQTTQKGQKNSRER | |
| | MKRLEESIKELGSEILKEHPVENTKLQNDKLYLYYLQNGRDMYTGEPLDIDN | |
| | LSDYDVDHIVPQSFLKDDSIDNRVLVSSAKARGKSDDVPSEEVVRKMKSFWK | |
| | KLLDAKLITQRKYDNLTKAERGGLTELDKAGFIKRQLVETRQITKHVAQILD | |
| | ERFNTEYDENGKLIRKVKIVTLKSKLVSQFRKEFELYKVREINNYHHAHDAY | |
| | LNAVVGKALIKKYPKLESEFVYGDYPVYDVYKFVAKSDREIGKATAKMFFYS | |
| | NIMNFFKSDVKLADGEIVERPDIEVNEETGEIAWDKDKHIATVKKVLSMPQV | |
| | NIVKKTEVQTGGFSKESILPKRDSDKLIARKKDWDTKKYGGFDSPTVAYSVL | |
| | VVADIEKGKAKKLKTVKELVGITIMERSAFEKDPVAFLESKGYQNIQKENII | |
| | KLPKYSLFELENGRKRLLASAGELQKGNELALPNHYVTLLYHAKHYEKLKGK | |
| | PEDIEKHLIYVEEHRDEFDELLDQISEFSKRYILADANLEKIKKLYEKNKEA | |
| | SIEELASSFINLLTFTALGAPAAFKFFGKNIDRKRYTSTKEILNATLIHQSI | |
| | TGLYETRIDLSKLGGD | |
| CasEnd-285 | MKKPYSIGLDIGTNSVGWAVVTDDYKVPSKKMKVLGNTDRSSIKKNLLGALL | 245 |
| | FDSGETAEATRLKRTARRRYTRRKNRILYLQEIFAEEMNKVDDSFFHRLEDS | |
| | FLVEEDKRGERHPIFGNIVEEVKYHEEFPTIYHLRKELADSPEKADLRLVYL | |
| | ALAHIIKFRGHFLIEGDLDTENTDVQQLFQEFLEVYDKTFEDSHLSEQNVQV | |
| | EEILTDKISKSAKKERVLKLFPNEKSNGFFAEFLKLIVGNQADFKKHENLEE | |
| | KAKLQFSKDTYEEDLETLLGQIGDEYADVFVAAKKLYDSILLSGILTVTDVS | |
| | TKAPLSASMVQRYEEHHEDLTKLKQFIRKKLPEKYKEFFFDTSKNGYAGYID | |
| | GGTSQEEFYKYLKKLLNKIAGSEYFLEKIEREDFLRKQRTFDNGSIPHQIHL | |
| | QELKAIIRRQAEYYPFLAENQDKIEKILTFRIPYYVGPLARGNSRFAWASRK | |
| | SDETITPWNFDEIIDKEKSAEAFINRMTNNDLYLPEEKVLPKHSLLYEKFTV | |
| | YNELTKVKYITEQMGETKFFDANMKQEIFDGVFKKYRKVTKKKLLNFLDKEF | |
| | DEFRIVDLSGVEKAFNASLGTYHDLKKILGDKEFLDDPDNEDILEDIIQTLT | |
| | LFEDREMIRKRLSKYSDLFTKEQLKKLERRHYTGWGRLSAKLINGIRDKETR | |
| | KTILDYLIDDGRSNRNFMQLIHDDGLSFKEEIAKAQVIGETDSLHQVVADLA | |
| | GSPAIKKGILQSLKIVDELVKVMGRYNPENIVVEMARENQTTNKGQRNSRER | |
| | LKGLTDAIKNLGSKILKEYPVDNQQLQNDRLYLYYLQNGKDMYTGEELDIDN | |
| | LSQYDVDHIIPQSFIKDDSIDNRVLVSSAKARGKSDDVPSIEVVRKMKSFWS | |
| | KLLDAKLISQRKFDNLTKAERGGLTEDDKAGFIKRQLVETRQITKHVAQILD | |
| | ERFNTEKDENGKLIRKVKIVTLKSKLVSNFRKEFELYKVREINDYHHAHDAY | |
| | LNAVVAKALIKKYPKLEPEFVYGDYPKYNSYKLVGETKNERGKATAKMFFYS | |
| | NIMNFFKSDVKLADGTEVERPMIEVNEETGEIIWDKKKHISIVKKVLSMPQV | |
| | NIVKKTEVQTGGFSKESILPKRNSDKLIARKKKWDTKKYGGFDSPIVAYSVL | |
| | VIADIEKGKAQKLKTVKELVGITIMERSRFEKDPVAFLENKGYQNIREENII | |
| | KLPKYSLFELENGRKRLLASAGELQKGNELALPNHLVTLLYHAKNIEKLDEK | |
| | EEEKPKHKNYVEKHRSEFKELLDQVSEFSKRYILADKNLEKIEELYAQNEEA | |
| | SIEELASSFINLLTFTALGAPADFKFFGKNIDRKRYTSTTEILNATLIHQSI | |
| | TGLYETRIDLSKLGED | |
| CasEnd-286 | MDKPYSIGLDIGTNSVGWAVVTDEYKVPSKKFKVLGNTDRHSIKKNLLGALL | 246 |
| | FDSGETAEATRLKRTARRRYTRRKNRIRYLQEIFAEEMNKVDDSFFHRLEES | |
| | FLVEEDKRGERHPIFGNIVEEVAYHEEYPTIYHLRKKLADSTEKADLRLVYL | |
| | ALAHIIKFRGHFLIEGDLNSENTDVQKLFKEFVQTYDNTFEESHLQEETVDA | |
| | KSILTAKISKSRRLENLIKQFPGEKKNGLFGNLIALSLGLQPNFKINFELSE | |
| | DAKLQFSKDTYDEDLENLLAQIGDEYADLFVAAKNLSDAILLSGILTVNTEI | |
| | TKAPLSASMIKRYDEHHQDLTLLKKFIRQQLPEKYKEIFFDASKNGYAGYID | |
| | GGASQEEFYKYIKPILSKIDGSEYFLDKIEREDFLRKQRTFDNGSIPHQIHL | |
| | QELHAILRRQEEFYPFLKENQEKIEKILTFRIPYYVGPLARGNSRFAWASRK | |
| | SDETITPWNFEEVVDKEASAQAFIERMTNNDKNLPEEKVLPKHSLLYEKFTV | |
| | YNELTKVKYVTEGMRKPAFFDSEQKQEIVDLLFKTNRKVTKKKLKEYLFKEI | |
| | ECFDSVEISGVEDRFNASLGTYHDLLKIIKDKDFLDNEENEEILEDIVLTLT | |
| | LFEDREMIKERLSKYADLFDKKVLKKLERRRYTGWGRLSAKLINGIRDKQSG | |
| | KTILDYLIDDGFANRNFMQLIHDDSLSFKEEIKKAQVIGDTDSLHEVIANLA | |
| | GSPAIKKGILQSIKIVDELVKVMGRHNPENIVIEMARENQTTQKGQRNSRER | |
| | LKRLEEAIKELGSNILKEHPVENTQLQNDKLYLYYLQNGKDMYTGEELDIDR | |
| | LSDYDVDHIIPQSFIKDDSIDNRVLTSSAKARGKSDNVPSEEVVKKMKSFWR | |
| | QLLDSKLISQRKFDNLTKAERGGLTELDKAGFIKRQLVETRQITKHVAQILD | |
| | SRFNTKYDENDKLIREVKIITLKSKLVSDFRKDFQLYKVREINDYHHAHDAY | |
| | LNAVVGTALIKKYPKLESEFVYGDYKVYNSYKMIAKSEQEIGKATAKYFFYS | |
| | NIMNFFKTDITLANGEIRKRPLIETNEETGEIVWDKDKDFATVRKVLSMPQV | |
| | NIVKKTEVQTGGFSKESILPKRNSDKLIARKKDWDTKKYGGFDSPTVAYSVL | |
| | VIADIEKGKAKKLKTVKELVGITIMERSAFEKNPVAFLEDKGYQNIQKENII | |
| | KLPKYSLFELENGRKRLLASAGELQKGNELALPNKYVTLLYHAKHYEKLKES | |
| | PEDNPEKLEYVEQHRDEFDEIFDQISEFSERYILADKNLEKIQEAYAKNEDA | |
| | SIEELAESFINLLTFTALGAPAAFKFFGKTIDRKRYTSTKEILNATLIHQSI | |
| | TGLYETRIDLSQLGGD | |
| CasEnd-287 | MDKPYSIGLDIGTNSVGWAVVTDEYKVPSKKFKVLGNTDRHSIKKNLIGALL | 247 |
| | FDSGETAEATRLKRTARRRYTRRKNRIRYLQEIFAEEMSKVDDSFFHRLEES | |
| | FLVEEDKRGERHPIFGNIVDEVAYHEKYPTIYHLRKHLADSSEKADLRLIYL | |
| | ALAHIIKFRGHFLIEGDLNAENTDVQKLFKQLVDVYDQTFEESHLSEETVDA | |
| | KSILTEKVSKSRRLENLIKCFPNEKRNGLFGNLIALSLGLTPNFKSNFELAE | |
| | DAKLQFSKDTYDEDLENLLAQIGDQYADLFVAAKNLYDAILLSGILTVNTEI | |
| | TKAPLSASMIKRYDEHHQDLTLLKHFVRTQLPEKYKEIFFDVSKNGYAGYID | |
| | GGASQEEFYKYLKPILSKIDGTEYLLDKIEREDFLRKQRTEDNGSIPHQIHL | |
| | QELKAILRRQEDYYPFLKENQEKIEKILTFRIPYYVGPLARGNSRFAWMSRK | |
| | SDETITPWNFEEVIDKEASAQAFIERMTNFDKNLPEEKVLPKHSLLYEKFTV | |
| | YNELTKVKYVTEGMRKPAFFSANQKQEIVDLLFKKNRKVTKKKLKNFLFKKF | |
| | DCFDIVEISGVEDRFNASLGTYHDLLKIIKDKDFLDNSENEEIFEEIILTLT | |
| | LFEDREMIEERLKKYAHLFDKKVLKKLKRRRYTGWGRLSKKLINGIRDKQSG | |
| | KTILDYLIDDGFSNRNFMQLIHDDSLTFKEEIAKAQVIGQSESLHETIANLA | |
| | GSPAIKKGILQSLKIVDELVKVMGRHNPENIVIEMARENQTTQKGQRNSRER | |
| | MKRLEEAIKELGSQILKEHPVENTQLQNDKLYLYYLQNGKDMYTGEELDIDR | |
| | LSDYDVDHIIPQSFIKDDSIDNRVLTSSAEARGKSDNVPSEEVVKKMKSFWR | |
| | RLLDSKLISQRKFDNLTKAERGGLSELDKAGFIKRQLVETRQITKHVAQILD | |
| | SRFNTKYDENDKLIRNVKIITLKSKLVSDFRKDFQFYKVREINDYHHAHDAY | |
| | LNAVVGTALIKKYPKLESEFVYGDYKVYDSRKMIAKSEQEIGKATAKYFFYS | |
| | NIMNFFKSEITLANGEIRKRPLIETNEETGEIVWDKKKDIATVRKVLSMPQV | |
| | NIVKKTEVQTGGFSKESILPKRNSDKLIARKKDWDTKKYGGFDSPTVAYSVL | |
| | VVADIEKGKSKKLKTVKELVGITIMERSAFEKDPIAFLEKKGYKNIQKDNII | |
| | KLPKYSLFELENGRKRLLASAGELQKGNELALPNHYVTLLYHAKRYEKLKGS | |
| | PEDNEKHLEYVEQHRAEFDEILSQISEFSERYILADKNLEKIQELYAKNRDE | |
| | DIKELASSFINLFTFTALGAPAAFKFFDKTIDRKRYTSTTEVLNATLIHQSI | |
| | TGLYETRIDLSQLGGD | |
| CasEnd-288 | MDKKYSIGLDIGTNSVGWAVITDEYKVPSKKFKVLGNTDRHSIKKNLIGALL | 248 |
| | FDSGETAEATRLKRTARRRYTRRKNRICYLQEIFSNEMAKVDESFFHRLEES | |
| | FLVEEDKRGERHPIFGNIVDEVAYHEKYPTIYHLRKHLADSTEKADLRLIYL | |
| | ALAHMIKFRGHFLIEGDLNSENTDVQKLFKQFVEAYDQTFEESHLEEITVDA | |
| | KAILTEKLSKSRRLENLIAQFPGEKKNGLFGNLIALSLGLTPNFKSNFKLSE | |
| | DAKLQFSKDTYDEDLENLLGQIGDEYADLFVAAKNLYDAILLSGILTVNDES | |
| | TKAPLSASMIKRYDEHHQDLTLLKAFVREQLPEKYKEIFFDESKNGYAGYID | |
| | GGASQEEFYKYIKPILEKVDGSEYFLDKIEREDFLRKQRTFDNGSIPHQIHL | |
| | QELHAILRRQEEYYPFLKENQEKIEKILTFRIPYYVGPLARGNSRFAWMTRK | |
| | SDETITPWNFEEVVDKEASAQAFIERMTNNDKNLPEEKVLPKHSLLYEKFTV | |
| | YNELTKVKYVTEGMGKAEFFDANQKQEIFDGLFKKNRKVTKKKLLDFLFKEF | |
| | EEFRIVDISGVEDAFNASLGTYHDLLKIIKDKEFLDNEENEDILEDIVLTLT | |
| | LFEDREMIEKRLKKYADLFDKKVLKKLERRRYTGWGRLSAKLINGIRDKQSG | |
| | KTILDYLIDDGFANRNFMQLIHDDSLTFKEEIKKAQVIGESDSLHEHIANLA | |
| | GSPAIKKGILQTVKVVDELVKVMGRHKPENIVIEMARENQTTQKGQKNSRER | |
| | MKRIEEGIKELGSQILKEHPVENTQLQNEKLYLYYLQNGRDMYVDQELDINR | |
| | LSDYDVDHIVPQSFLKDDSIDNKVLTRSDKARGKSDNVPSEEVVKKMKNYWR | |
| | QLLNAKLITQRKFDNLTKAERGGLSELDKAGFIKRQLVETRQITKHVAQILD | |
| | SRMNTKYDENDKLIREVKVITLKSKLVSDFRKDFQFYKVREINNYHHAHDAY | |
| | LNAVVGTALIKKYPKLESEFVYGDYKVYDVRKMIAKSEQEIGKATAKYFFYS | |
| | NIMNFFKTEITLANGEIRKRPLIETNGETGEIVWDKGRDFATVRKVLSMPQV | |
| | NIVKKTEVQTGGFSKESILPKRKSDKLIARKKDWDTKKYGGFDSPTVAYSVL | |
| | VVADVEKGKAKKLKTVKELVGITIMERSAFEKNPVAFLEDKGYQNIQEDNII | |
| | KLPKYSLFELENGRKRLLASAGELQKGNELALPNKYVTLLYHAKNYEKLKGK | |
| | SEDEEEHLEYVSKHNDEFKEILDQISEFSERYILADKNLEKIKELYEQNEDY | |
| | SISELASSFINLLTFTALGAPAAFKFFGTTIDRKRYTSTKEILNSTLIHQSI | |
| | TGLYETRIDLSKLGGD | |
| CasEnd-289 | MDKKYSIGLDIGTNSVGWAVITDEYKVPSKKFKVLGNTDRHSIKKNLIGALL | 249 |
| | FDSGETAEATRLKRTARRRYTRRKNRIRYLQEIFSEEMSKVDDSFFHRLEES | |
| | FLVEEDKRHERHPIFGNIVDEVAYHENYPTIYHLRKKLADSTEKADLRLIYL | |
| | ALAHIIKFRGHFLIEGDLNPDNTDVDKLFIQLVQTYNQLFEENPIHEENVDA | |
| | KAILTAKLSKSRRLENLIAQIPGEKKNGLFGNLIALSLGLTPNFKSNEDLAE | |
| | DAKLQLSKDTYDEDLDNLLAQIGDQYADLFLAAKNLSDAILLSDILTVNDEI | |
| | TKAPLSASMIKRYDEHHQDLTLLKALVREQLPEKYKEIFFDQSKNGYAGYID | |
| | GGASQEEFYKYIKPILSKLDGTEELLAKLNREDLLRKQRTFDNGSIPHQIHL | |
| | GELHAILRRQEDFYPFLKENREKIEKILTFRIPYYVGPLARGNSRFAWMTRK | |
| | SDETITPWNFEEVVDKEASAQAFIERMTNFDKNLPNEKVLPKHSLLYEYFTV | |
| | YNELTKVKYVTEGMRKPEFLSAEQKEEIVDLLFKTNRKVTVKQLKEFLFKKI | |
| | DCFDSVEISGVEDRFNASLGTYHDLLKIIKDKDFLDNEENEAILEDIVLTLT | |
| | LFEDKEMIEERLSKYAHLFDKKVLKQLKRRRYTGWGRLSRKLINGIKDKQSG | |
| | KTILDFLKSDGFANRNFMQLIHDDSLTFKEDIQKAQVEGQGESLHEQIANLA | |
| | GSPAIKKGILQTVKVVDELVKVMGRHKPENIVIEMARENQTTQKGQKNSRER | |
| | MKRIEEGIKELGSQILKEHPVENTQLQNEKLYLYYLQNGRDMYVDQELDINR | |
| | LSDYDVDHIVPQSFLKDDSIDNKVLTRSDKARGKSDNVPSEEVVKKMKNYWR | |
| | QLLNAKLITQRKFDNLTKAERGGLSELDKAGFIKRQLVETRQITKHVAQILD | |
| | SRFNTEYDENDKLIREVKIITLKSKLVSDFRKEFQFYKVREINDYHHAHDAY | |
| | LNAVVGKALIKKYPKLESEFVYGDYKVYDVRKMIAKSEQEIGKATAKYFFYS | |
| | NIMNFFKSEITLANGEIRKRPLIETNEETGEIVWDKGKDFATVKKVLSMPQV | |
| | NIVKKTEVQTGGFSKESILPKRNSDKLIARKKDWDTKKYGGFDSPTVAYSVL | |
| | VVAKVEKGKSKKLKTVKELVGITIMERSSFEKDPVAFLEAKGYKNVQKHLII | |
| | KLPKYSLFELENGRKRLLASAGELQKGNELALPSKYVTLLYHASHYEKLKGK | |
| | PEDEEKKLEYVEQHRYYFDEILEQIVEFSKRYILADKNLEKIQELYSENESY | |
| | PIEELAENFIHLFTFTALGAPAAFKFFDTDIDRKRYTSTTEILNATLIHQSI | |
| | TGLYETRIDLSQLGGD | |
| CasEnd-290 | MDKPYSIGLDIGTNSVGWAVVTDEYKVPSKKFKVLGNTDRHSIKKNLLGALL | 250 |
| | FDSGETAEATRLKRTARRRYTRRKNRIRYLQEIFAEEMNKVDDSFFHRLEES | |
| | FLVEEDKRGERHPIFGNIVDEVAYHEKYPTIYHLRKKLADSTEKADLRLVYL | |
| | ALAHMIKFRGHFLIEGDLDAENTDVQKLFEEFVQVYDNTFEESHLSEETVDA | |
| | SSILTAKLSKSRRLENLIKLYPNEKKNGLFGNLIALSLGLQPNFKTNFNLAE | |
| | DAKLQFSKDTYEEDLENLLGQIGDEYADLFVAAKNLYDAILLSGILTVNTEI | |
| | TKAPLSASMIKRYDEHHQDLTLLKEFIRANLPEKYKEIFFDETKNGYAGYID | |
| | GGAKQEEFYKYLKPILSKIDGSEYFLDKIEREDFLRKQRTFDNGSIPHQIHL | |
| | QELHAILRRQGEFYPFLKENQEKIEKILTFRIPYYVGPLARGNSRFAWASRK | |
| | SDETITPWNFDEVVDKESSAEAFIERMTNNDKNLPEEKVLPKHSLLYEKFTV | |
| | YNELTKVKYITEQMRKPAFFDANVKKEIFDLVFKKNRKVTKKKLLDYLFKEF | |
| | DEFRIVDISGVEKSFNASLGTYHDLLKIIKDKEFLDNEENEKILEDIVLTLT | |
| | LFEDREMIDKRLEKYADLFDKKVLKKLERRRYTGWGRLSAKLINGIRDKQSG | |
| | KTILDYLIDDGFANRNFMQLIHDDSLSFKEEIQKAQVIGQTDSLHEVIADLA | |
| | GSPAIKKGILQSLKIVDELVKVMGRHKPENIVIEMARENQTTQKGQRNSRER | |
| | LKRLEEAIKELGSKILKEHPVENTQLQNDKLYLYYLQNGKDMYTGEELDIDR | |
| | LSDYDVDHIIPQSFIKDDSIDNRVLTSSKEARGKSDDVPSEEVVKKMKSFWN | |
| | RLLKAKLISQRKFDNLTKAERGGLTELDKAGFIKRQLVETRQITKHVAQILD | |
| | SRFNTKYDENDKLIRKVKIVTLKSKLVSQFRKEFQLYKVREINDYHHAHDAY | |
| | LNAVVGKALIKKYPKLESEFVYGDYKVYNSRKMIAKSEQEIGKATAKYFFYS | |
| | NIMNFFKTDVTLANGEIRKRPLIETNKETGEIVWDKEKDFATVRKVLSMPQV | |
| | NIVKKTEVQTGGFSKESILPKRDSDKLIARKKDWDTKKYGGFDSPTVAYSVL | |
| | VVADIEKGKVKKLKTVKELVGITIMERSSFEKNPIAFLEDKGYKNVQKENII | |
| | KLPKYSLFELENGRKRLLASAGELQKGNELALPQKYVTLLYHAKHYEKLKES | |
| | PEDNEKHLLYVEQHRSYFDEILDQISEFSKRYILADKNLDKIKELYAENEGA | |
| | DVEELASSFINLLTFTALGAPAAFKFFDADIDRKRYTSTTEILDATLIHQSI | |
| | TGLYETRIDLSQLGGD | |
| CasEnd-291 | MKKDYTIGLDIGTNSVGYAVVYAEYKVVSKKFKVLGNGQRKSIKKNFWGVRL | 251 |
| | FDSGETAEATRLKRTARRRYTRRKNRIRYLQEIFNEEMNAVDQNFFHRLEES | |
| | FLVEEDKRNERHPIFATIVEEVAYHEEYPTIYHLRKHLADCKEQSDIRLVYL | |
| | ALAHIIKFRGHFLIEGKLSTENTSIRENFKKFLQIYNQTFSVQEDGSETSGV | |
| | EELLQEKASRQKKAENVLKLFPTEKANGTFMQFLKLIVGNQGNFKKTENLSE | |
| | DVKLQFSKDTYEEQLEELLANVGDDYAEVFVAAKNVYDAIELSGILTVKDFT | |
| | TKAKLSASMVKRYDEHHQDLTKLKKFIRDKLPEKYKDIFFNEKKNGYAGYID | |
| | GGAKQDDFYKYLKKVLNRAEGADYFLDKIDKEEFLRKQRTFDNGSIPHQIHL | |
| | EELRAIIGKQAKYYPFLAENKAKIEQILTFRIPYYVGPLARGNSRFAWLSRK | |
| | KQETITPWNYGELIDEGKTATDFIERMTNYDKNLPQEKVLPKHSMLYEKFTV | |
| | FNELTKVKYIDDRMGETQFFSSLEKREIFEELFKKSRKVKLTDLENFLKNQF | |
| | YMIEVSKISGVEKSFNASYGTYHDFRKIGIEREVLDAPENEEMFEEIIKILT | |
| | VFEDRKMIREQLSKYGDFFEPKILKKLERRRYTGWGRLSAKLINGIKDKHTK | |
| | KTILDYLMRDDAKNRNFMQLIHDDSLSFKEEIAKEQADEQTDSLHEIIANLA | |
| | GSPAIKKGILQSLKIVDEIVKVMGRYAPKNIVVEMARENQTTQKGQDNSRER | |
| | LKNLEDAIKELGSNILKEYPLDNTDLQRDKLYLYYLQNGKDMYTGLDLDIDQ | |
| | LSDYDVDHIIPQSFIKDDSIDNLVLVSSSKARGKSDDVPSIEIVEKMKPEWE | |
| | RLKNANLISQRKYDNLTKAERGGLTELDKAGFIKRQLVETRQITKHVAQILH | |
| | QRFNSEKTSEGKLERRTKIITLKSKLTSQFRKIYGLYKVREINDYHHGHDAY | |
| | LNGVVANALIKVYPNLESEFVYGDYRVFNSFKLVRETDEKIGKATAKKEFYS | |
| | NLMRFFKSDQKLADDSVIEKPRVEVDDENGEILWGQKKDISTVKKVMSMPQV | |
| | NIVKKTEVQTGGFSKESILPKRDSDKLIARKKDWDTRKYGGFDSPTVAYSVV | |
| | ISYEKGKKKKQKIKTVKDIVGITIMERSKFEENEVQFLIDKGFVNPKEIVEV | |
| | KLPKYTLYEVENGRKRLLASAGELQKGNELALPNHYVTLLYHAKHYEKIKEK | |
| | EKEEKNSYNYLVDHRKEFDELFEQVKEFAERYTLADKNLEKITTLFEENHEA | |
| | DIKLIAQSFLNLMQFNAMGAPAAFKFFGQVIDRKRYTSIKELLNATIIHQSI | |
| | TGLYETRIKLGKLGEE | |
| CasEnd-292 | MDKPYSIGLDIGTNSVGWAVITDEYKVPSKKFKVLGNTDRHSIKKNLLGALL | 252 |
| | FDSGETAEATRLKRTARRRYTRRKNRIRYLQEIFAEEMSKVDDSFFHRLEES | |
| | FLVEEDKRGERHPIFGNIVEEVAYHEEYPTIYHLRKHLADSTEKADLRLVYL | |
| | ALAHMIKFRGHFLIEGDLDSENTDVQKLFEQFVQVYDNTFEESHLSEETVDA | |
| | ESILTAKISKSRRLENLIKLFPGEKKNGLFGNLIALILGLQPNFKTNFELSE | |
| | DAKLQFSKDTYEEDLENLLGQIGDDYADLFVAAKNLYDAILLSGILTVNTEI | |
| | TKAPLSASMIKRYDEHHQDLTLLKKFIRENLPEKYKEIFFDESKNGYAGYID | |
| | GGASQEEFYKYIKNLLSKIDGSEYFLDKIEREDFLRKQRTFDNGSIPHQIHL | |
| | QELHAILRRQGEYYPFLKENQEKIEKILTFRIPYYVGPLARGNSRFAWASRK | |
| | SDETITPWNFEEVVDKESSAEAFIERMTNNDKNLPEEKVLPKHSLLYEKFTV | |
| | YNELTKVKYITEGMRKPAFFDANQKQEIFDGLFKKNRKVTKKKLLEFLFKEF | |
| | DEFRIVDISGVEKAFNASLGTYHDLLKIIKDKDELDNEENEDILEDIVLTLT | |
| | LFEDREMIEKRLSKYADLFDKKVLKKLERRRYTGWGRLSAKLINGIRDKQSG | |
| | KTILDYLIDDGFANRNFMQLIHDDSLSFKEEIQKAQVIGQTDSLHETIADLA | |
| | GSPAIKKGILQSLKIVDELVKVMGRHAPENIVIEMARENQTTQKGQRNSRER | |
| | LKRLEESIKELGSKILKEHPVDNTQLQNDKLYLYYLQNGRDMYTGEELDIDR | |
| | LSDYDVDHIIPQSFIKDDSIDNRVLTSSAKARGKSDDVPSEEVVKKMKSFWQ | |
| | QLLDSKLISQRKFDNLTKAERGGLTELDKAGFIKRQLVETRQITKHVAQILD | |
| | SRFNTKYDENDKLIRDVKIITLKSKLVSQFRKEFGFYKVREINDYHHAHDAY | |
| | LNAVVGKALIKKYPKLESEFVYGDYPVYNSYKMIAKSEQEIGKATAKYFFYS | |
| | NIMNFFKKDVTLANGEIRKRPLIETNEETGEIVWDKEKHIATVKKVLSMPQV | |
| | NIVKKTEVQTGGFSKESILPKRNSDKLIARKKDWDTKKYGGFDSPTVAYSVL | |
| | VVADIEKGKAKKLKTVKELVGITIMERSSFEKNPVAFLENKGYQNIQKENII | |
| | KLPKYSLFELENGRKRLLASAGELQKGNELALPNKYVTLLYHAKHYEKLKES | |
| | PEDNPEHLEYVEEHRDEFDELFDQISEFSKRYILADKNLEKIKELYNENEEA | |
| | SIEELAESFINLLTFTALGAPAAFKFFGVDIDRKRYTSTTEILNATLIHQSI | |
| | TGLYETRIDLSQLGGD | |
| CasEnd-293 | MDKKYSIGLDIGTNSVGWAVITDEYKVPSKKFKVLGNTDRHSIKKNLIGALL | 253 |
| | FDSGETAEATRLKRTARRRYTRRKNRICYLQEIFSNEMAKVDDSFFHRLEES | |
| | FLVEEDKRGERHPIFGNIVEEVAYHEKYPTIYHLRKHLADSDEKADLRLVYL | |
| | ALAHIIKFRGHFLIEGDLKSENSDVQKLFKDLVEVYDQTFEESHLSEETVDA | |
| | ESILTEKISKSRRLENLIKQFPNEKKNGLFGNLIALSLGLQPNFKTNEDLSE | |
| | DAKLQFSKDTYDEDLENLLGQIGDEYADLFLAAKNLYDAILLSGILTVNDES | |
| | TKAPLSASMIKRYDEHHQDLTLLKKFIREQLPEKYKEIFFDETKNGYAGYID | |
| | GGASQEEFYKYIKKILEKVDGSEYFLEKIEREDFLRKQRTFDNGSIPHQIHL | |
| | QELHAILRRQEEYYPFLKENQEKIEKILTFRIPYYVGPLARGNSRFAWMSRK | |
| | SDETITPWNFDEVVDKEASAEAFIERMTNFDKNLPEEKVLPKHSLLYEKFTV | |
| | YNELTKVKYVTEGMGKPKFFDANMKQEIFDGLFKKNRKVTKKKLLDFLDKEF | |
| | DEFRIVDISGVEKAFNASLGTYHDLLKIIKDKDFLDNEENEDILEDIVLTLT | |
| | LFEDREMIEKRLEKYADLFDKKQLKKLERRRYTGWGRLSAKLINGIRDKQSG | |
| | KTILDYLIDDGFANRNFMQLIHDDALSFKEEIQKAQVIGEGDSLHEHIANLA | |
| | GSPAIKKGILQTVKVVDELVKVMGRHKPENIVIEMARENQTTQKGQKNSRER | |
| | MKRIEEGIKELGSQILKEHPVENTQLQNEKLYLYYLQNGRDMYVDQELDINR | |
| | LSDYDVDHIVPQSFLKDDSIDNKVLTRSDKARGKSDNVPSEEVVKKMKNYWR | |
| | QLLNAKLITQRKFDNLTKAERGGLSELDKAGFIKRQLVETRQITKHVAQILD | |
| | SRMNTKYDENDKLIREVKVITLKSKLVSDFRKDFQFYKVREINNYHHAHDAY | |
| | LNAVVGTALIKKYPKLESEFVYGDYKVYDVRKMIAKSEQEIGKATAKYFFYS | |
| | NIMNFFKTEITLANGEIRKRPLIETNGETGEIVWDKGRDFATVRKVLSMPQV | |
| | NIVKKTEVQTGGFSKESILPKRNSDKLIARKKDWDTKKYGGFDSPTVAYSVL | |
| | VVADIEKGKKKKLKTVKELVGITIMERSRFEKNPVAFLEDKGYKNIQEEKII | |
| | KLPKYSLFELENGRKRLLASAGELQKGNELALPAHYVTLLYHAKNYEKLKEK | |
| | PEDEEKHLEYVDKHRDEFKEILDQISEFSERYILADGNLEKIKELYKKNEDA | |
| | SISELASSFINLLTFTALGAPAAFKFLGSTIDRKRYTSTTEILNATLIHQSI | |
| | TGLYETRIDLSKLGGD | |
| CasEnd-294 | MKKPYSIGLDIGTNSVGWAVVTDDYKVPSKKMKVLGNTDRQSIKKNLLGALL | 254 |
| | FDSGETAEATRLKRTARRRYTRRKNRILYLQEIFAEEMNKVDDSFFHRLEDS | |
| | FLVEEDKRGERHPIFGNIVEEVAYHEKFPTIYHLRKHLADSTEKADLRLVYL | |
| | ALAHIIKFRGHFLIEGDLNTENTDVQKLFKKFVEVYDRTFEESHLSEETVDA | |
| | EEILTEKVSKSRKLENLLKQFPNEKKNGLFGNLIALSLGLQPNFKINFELSE | |
| | DAKLQFSKDTYDEDLENLLGQIGDEYADLFVAAKNLYDAILLSGILTVNDLS | |
| | TKAPLSASMIKRYEEHHEDLILLKKFIRKNLPEKYKEIFFDESKNGYAGYID | |
| | GGTSQEEFYKYIKNLLSKIDGSEYFLDKIEREDFLRKQRTFDNGSIPHQIHL | |
| | QELKAILRRQGEFYPFLKENQEKIEKILTFRIPYYVGPLARGNSRFAWASRK | |
| | SDETITPWNFDEVIDKEKSAEAFIERMTNNDLYLPEEKVLPKHSLLYEKFTV | |
| | YNELTKVKYVTEGMGEAEFFDANLKQEIFDGLFKKERKVTKKKLLEFLDKEF | |
| | DEFRIVDISGVEKAFNASLGTYHDLLKIIKDKEFLDNEENEDILEDIVLTLT | |
| | LFEDREMIKQRLSKYADLFDKKVLKKLERRHYTGWGRLSAKLINGIRDKQSG | |
| | KTILDYLIDDGFANRNFMQLIHDDNLSFKEEIAKAQVIGESDSLHEVVAELA | |
| | GSPAIKKGILQSLKIVDELVKVMGRYAPENIVVEMARENQTTAKGQRNSRER | |
| | LKRLEEAIKELGSKILKEHPVENQQLQNDRLYLYYLQNGKDMYTGEELDIDR | |
| | LSQYDVDHIIPQSFIKDDSIDNRVLTSSAKARGKSDDVPSEEVVKKMKSEWS | |
| | KLLNAKLISQRKFDNLTKAERGGLTEDDKAGFIKRQLVETRQITKHVAQILD | |
| | ERFNTEFDENNKLIRKVKIITLKSKLVSNFRKEFEFYKVREINDYHHAHDAY | |
| | LNAVVGKALIKKYPKLEPEFVYGDYPKYNSYKLVAKSEQERGKATAKMFFYS | |
| | NIMNFFKSDIKLADGTIVERPMIEVNEETGEIAWDKTKHIATVKKVLSMPQV | |
| | NIVKKTEVQTGGFSKESILPKRNSDKLIARKKKWDTKKYGGFDSPTVAYSVL | |
| | VVADIEKGKSKKLKTVKELVGITIMERSRFEKNPVAFLEDKGYQNIQEENII | |
| | KLPKYSLFELENGRKRLLASAGELQKGNELALPNKLVTLLYHAKHIEKLDEK | |
| | PEDIEKHLEYVEKHRDEFKEILDQISEFSKRYILADKNLEKIEELYAKNEDA | |
| | SIEELASSFINLLTFTALGAPADFKFFGKTIDRKRYTSTTEILNATLIHQSI | |
| | TGLYETRIDLSKLGGD | |
| CasEnd-295 | MDKPYSIGLDIGTNSVGWAVVTDEYKVPSKKFKVLGNTDRHSIKKNLLGALL | 255 |
| | FDSGETAEATRLKRTARRRYTRRKNRILYLQEIFAEEMNKVDDSFFHRLEES | |
| | FLVEEDKRNERHPIFGNIVDEVAYHENYPTIYHLRKKLADSPEKADLRLIYL | |
| | ALAHIIKFRGHFLIEGDLNVENTDVQKLFKDFVETYDQTFEESHLSEISVDA | |
| | KEILTAKISKSRKLENLIKQFPNEKKNGLFGNLIKLSLGLQPNFKSNFKLSE | |
| | DAKLQFSKDTYEEDLENLLAQIGDEYADLFLAAKNLYDAILLSGILTVNTEI | |
| | TKAPLSASMVKRYDEHHQDLTLLKKFIREQLPEKYKEIFFDKSKNGYAGYID | |
| | GGASQEEFYKYIKKILSKIEGSEYFLDKIEREDFLRKQRTFDNGSIPHQIHL | |
| | EELKAILRRQEEYYPFLKENREKIEKILTFRIPYYVGPLARGNSRFAWASRK | |
| | SDETITPWNFEEVVDKEKSAEDFIERMTNNDKNLPEEKVLPKHSLLYEKFTV | |
| | YNELTKVKYVTEGMRKPAFFDAGQKKEIVDLLFKTNRKVTKKKLLEFLFKEF | |
| | DEFDIVDISGVEKAFNASLGTYHDLLKIIKDKDFLDNEENEKILEDIILTLT | |
| | LFEDREMIKKRLSKYANLFDKKVLKKLERRRYTGWGRLSAKLINGIRDKQSG | |
| | KTILDYLIDDGFSNRNFMQLIHDDSLSFKEEIQKAQVIGQTDSLHQTIADLA | |
| | GSPAIKKGILQSIKIVDELVKVMGRHAPENIVIEMARENQTTQKGQRNSRER | |
| | LKKLEESIKELGSQILKEHPVDNTQLQNDKLYLYYLQNGKDMYTGEELDIDR | |
| | LSDYDVDHIIPQSFIKDDSIDNRVLTSSAKARGKSDDVPSEEVVKKMKSFWR | |
| | QLLDAKLISQRKFDNLTKAERGGLTELDKAGFIKRQLVETRQITKHVAQILD | |
| | SRFNTKYDENDKLIRDVKIITLKSKLVSQFRKEFGFYKVREINDYHHAHDAY | |
| | LNAVVGKALIKKYPKLESEFVYGDYKVYNSYKMIAKSEQEIGKATAKYFFYS | |
| | NIMNFFKEEITLANGEIRKRPLIETNEETGEIVWDKDKHIATVKKVLSMPQV | |
| | NIVKKTEVQTGGFSKESILPKRESDKLIARKKDWDTKKYGGFDSPTVAYSVL | |
| | VVADIEKGKAKKLKTVKELVGITIMERSSFEKNPVAFLEKKGYQNIQKENII | |
| | KLPKYSLFELENGRKRLLASAGELQKGNELALPNKYVTLLYHAKNYEKLKES | |
| | PEDNEKHLEYVEEHRDEFDEIFDQISEFSKRYILADKNLEKILELYDENRDA | |
| | PIKELAESFINLLTFTALGAPAAFKFFDKTIDRKRYTSTTEILDATLIHQSI | |
| | TGLYETRIDLSQLGGD | |
| CasEnd-296 | MDKPYSIGLDIGTNSVGWAVITDEYKVPSKKFKVLGNTDRHSIKKNLLGALL | 256 |
| | FDSGETAEATRLKRTARRRYTRRKNRIRYLQEIFAEEMSKVDDSFFHRLEES | |
| | FLVEEDKRGERHPIFGNIVDEVAYHEKYPTIYHLRKHLADSPEKADLRLVYL | |
| | ALAHMIKFRGHFLIEGDLKAENTDVQKLFINFVETYDNTFEESHLSEITVDA | |
| | SSILTEKVSKSRRLENLIKQFPTEKKNGLFGNLIALSLGLQPNFKSNFELSE | |
| | DAKLQFSKDTYEEDLENLLAQIGDQYADLFVAAKNLYDAILLSGILTVKTEI | |
| | TKAPLSASMIKRYDEHHQDLTLLKALIRENLPEKYKEIFFDESKNGYAGYID | |
| | GGASQEEFYKYIKPILLKMEGSEYFLDKIEREDFLRKQRTFDNGSIPHQIHL | |
| | QELHAILRRQEEYYPFLKENQEKIEKILTFRIPYYVGPLARGNSRFAWASRK | |
| | SDETITPWNFEEVVDKEASAEAFIERMTNNDKNLPEEKVLPKHSLLYEKFTV | |
| | YNELTKVKYVTERMRKPAFFDAEMKQEIVDLLFKENRKVTVKQLLEYLFKEF | |
| | DEFRSVDISGVEDRFNASLGTYHDLLKIIKDKAFLDNEENEDILEDIILTLT | |
| | LFEDREMIKKRLSKYADLFDKKVLKKLERRRYTGWGRLSAKLINGIRDKQTG | |
| | KTILDYLIDDGFANRNFMQLIHDDSLSFKEEIAKAQVIGQGDSLHETIADLA | |
| | GSPAIKKGILQSIKIVDELVKVMGRHAPENIVIEMARENQTTQKGQRNSRER | |
| | LKRLEESIKKLGSKILKEHPVENTQLQNDKLYLYYLQNGKDMYTGEELDIDN | |
| | LSDYDVDHIIPQSFIKDDSIDNRVLTSSAKARGKSDDVPSEEVVKKMKSFWR | |
| | QLLKAKLISQRKFDNLTKAERGGLTELDKAGFIKRQLVETRQITKHVAQILD | |
| | SRFNTKYDENDKLIRKVKIITLKSKLVSQFRKDFGFYKVREINDYHHAHDAY | |
| | LNAVVGTALIKKYPKLESEFVYGDYPVYNSRKMIAKSEQEIGKATAKYFFYS | |
| | NIMNFFKSDVTLANGEIRKRPLIETNEETGEIAWDKEKDFATVRKVLSMPQV | |
| | NIVKKTEVQTGGFSKESILPKRDSDKLIARKKDWDTKKYGGFDSPTVAYSVL | |
| | VVADIEKGKSKKLKTVKELVGITIMERSAFEKNPIAFLEKKGYQNIQKDNII | |
| | KLPKYSLFELENGRKRLLASAGELQKGNELALPNKYVTLLYHAARYEKSKES | |
| | PEDNPNHLLYVEKHKEEFDEILDQISEFSKRYILADSNLEKIEELYANNNKK | |
| | DISELASSFINLFTFTALGAPAAFKFFGATIDRKRYTSTTEILNATLIHQSI | |
| | TGLYETRIDLSQLGGD | |
| CasEnd-297 | MKKPYSIGLDIGTNSVGWAVVTDEYKVPSKKFKVLGNTDRQSIKKNLLGALL | 257 |
| | FDSGETAEATRLKRTARRRYTRRKNRILYLQEIFAEEMNKVDDSFFHRLEES | |
| | FLVEEDKRGERHPIFGNIVEEVAYHEKYPTIYHLRKHLADSTEKADLRLVYL | |
| | ALAHIIKFRGHFLIEGDLNTENTDVQKLFKQFLEVYDQTFEESHLSEETVDA | |
| | EAILTEKISKSRKLENLIKQFPNEKKNGLFGNLIALSLGLQPNFKSNFELSE | |
| | DAKLQFSKDTYEEDLENLLGQIGDEYADLFVAAKNLYDAILLSGILTVNDNS | |
| | TKAPLSASMIKRYDEHHQDLTLLKAFIRENLPEKYKEIFFDKSKNGYAGYID | |
| | GGAKQEEFYKYLKKLLSKIDGSEYFLEKIEREDFLRKQRTFDNGSIPHQIHL | |
| | QELHAILRRQEEFYPFLKENQEKIEKILTFRIPYYVGPLARGNSRFAWASRK | |
| | SDETITPWNFDEVIDKEASAQAFIERMTNNDKNLPEEKVLPKHSLLYEKFTV | |
| | YNELTKVKYVTEGMGEAQFFDANLKQEIFDGLFKKERKVTKKKLLEFLFKEF | |
| | DEFRIVDISGVEKRFNASLGTYHDLLKIIKDKDFLDNEENEKILEDIVLTLT | |
| | LFEDREMIKKRLSKYADLFDKKQLKKLERRRYTGWGRLSAKLINGIRDKQSG | |
| | KTILDYLIDDGFANRNFMQLIHDDNLTFKEEIAKAQVIGESDSLHEVIADLA | |
| | GSPAIKKGILQSLKIVDELVKVMGRYNPENIVVEMARENQTTQKGQRNSRER | |
| | LKRLEESIKNLGSNILKEHPVENTQLQNDKLYLYYLQNGKDMYTGEELDIDR | |
| | LSDYDVDHIIPQSFIKDDSIDNRVLTSSEKARGKSDDVPSEEVVKKMKSFWS | |
| | KLLNAKLISQRKFDNLTKAERGGLTELDKAGFIKRQLVETRQITKHVAQILD | |
| | ERFNTEFDENNKLIRKVKIITLKSKLVSNFRKEFELYKVREINDYHHAHDAY | |
| | LNAVVGKALIKKYPKLESEFVYGDYPVYNSYKMVAKSDKEIGKATAKMFFYS | |
| | NIMNFFKTDIKLADGRIVERPQIETNEETGEIVWDKEKHIATVKKVLSMPQV | |
| | NIVKKTEVQTGGFSKESILPKRNSDKLIARKKDWDTKKYGGFDSPTVAYSVL | |
| | VVADIEKGKAKKLKTVKELVGITIMERSRFEKNPVAFLEDKGYQNIQKEKII | |
| | KLPKYSLFELENGRKRLLASAGELQKGNELALPQKYVTLLYHAKHYEKLKEK | |
| | PEDIEKHKEYVEKHRSEFDEILDQISEFSKRYILADKNLEKIEELYEKNEDA | |
| | SIEELASSFINLLTFTALGAPAAFKFFGKTIDRKRYTSTTEILNATLIHQSI | |
| | TGLYETRIDLSKLGGD | |
| CasEnd-298 | MDKPYSIGLDIGTNSVGWAVVTDEYKVPSKKFKVLGNTDRHSIKKNLLGALL | 258 |
| | FDSGETAEATRLKRTARRRYTRRKNRIRYLQEIFAEEMSKVDDSFFHRLEES | |
| | FLVEEDKRNERHPIFGNIVDEVAYHEKYPTIYHLRKHLADSTEKADLRLIYL | |
| | ALAHIIKFRGHFLIEGDLNAENTDVQKLFEQFVQTYDQTFEESHLSEETVDA | |
| | KAILTDKLSKSRRLENLIAQFPTEKKNGLFGNLLALSLGLQPNFKSNFELAE | |
| | DAKLQFSKDTYDEDLENLLAQIGDQYADLFVAAKNLYDAILLSGILTVNTEI | |
| | TKAPLSASMIKRYDEHHQDLTLLKKFIRQNLPEKYKEIFFDDTKNGYAGYID | |
| | GGASQEEFYKYIKPILEKIDGSEYFLEKIEREDFLRKQRTFDNGSIPHQIHL | |
| | QELKAILRRQEEFYPFLKENQEKIEKILTFRIPYYVGPLARGNSRFAWASRK | |
| | SDETITPWNFEEVVDKEASAQAFIERMTNFDKNLPDEKVLPKHSLLYEKFTV | |
| | YNELTKVKYVTEGMRKPAFFDANQKQEIVDLLFKTNRKVTKKKLKEFLFKEF | |
| | ECFRIVEISGVEDRFNASLGTYHDLLKIIKDKDFLDNEENEDILEDIVLTLT | |
| | LFEDREMIKQRLSKYADLFDKKVLKQLSRRRYTGWGRLSAKLINGIRDKQTG | |
| | KTILDYLIDDGFANRNFMQLIHDDSLTFKEEITKAQVIGEGDSLHEVIADLA | |
| | GSPAIKKGILQSLKIVDELVKVMGRYAPENIVIEMARENQTTQKGQKNSRER | |
| | LKRLEEAIKELGSKILKEHPVENTQLQNDKLYLYYLQNGKDMYTGEELDIDR | |
| | LSDYDVDHIIPQSFIKDDSIDNRVLTSSKKARGKSDDVPSEEVVKKMKSFWR | |
| | QLLNAKLISQRKFDNLTKAERGGLTELDKAGFIKRQLVETRQITKHVAQILD | |
| | SRFNTKYDENDKLIREVKIITLKSKLVSDFRKDFGFYKVREINDYHHAHDAY | |
| | LNAVVGKALIKKYPKLESEFVYGDYPVYNSYKMIAKSEQEIGKATAKYFFYS | |
| | NIMNFFKTDITLANGEIRKRPLIETNEETGEIVWDKTKDFATVKKVLSMPQV | |
| | NIVKKTEVQTGGFSKESILPKRDSDKLIARKKDWDTKKYGGFDSPTVAYSVL | |
| | VIADVEKGKAKKLKTVKELVGITIMERSSFEKNPIAFLEDKGYQNIQKENII | |
| | KLPKYSLFELENGRKRLLASAGELQKGNELALPNKYVTLLYHAKHYEKLKES | |
| | PEDNEEKLEYVEQHRDEFDEILEQISEFSKRYILADKNLEKIKELYKKNEDA | |
| | SIEELAESFINLLTFTALGAPAAFKFFGKTIDRKRYTSTTEVLDATLIHQSI | |
| | TGLYETRIDLSQLGGD | |
| CasEnd-299 | MDKKYSIGLDIGTNSVGWAVITDEYKVPSKKFKVLGNTDRHSIKKNLIGALL | 259 |
| | FDSGETAEATRLKRTARRRYTRRKNRICYLQEIFSNEMAKVDDSFFHRLEES | |
| | FLVEEDKRGERHPIFGNIVDEVAYHEKYPTIYHLRKHLADSTEKADLRLIYL | |
| | ALAHIIKFRGHFLIEGDLNSENSDVQKLFEQLVEVYDQTFEESHLSEETVDA | |
| | KAILTEKLSKSRRLENLIAQFPNEKKNGLFGNLIALSLGLQPNFKSNFELSE | |
| | DAKLQFSKDTYDEDLENLLGQIGDQYADLFLAAKNLYDAILLSGILTVNDEI | |
| | TKAPLSASMIKRYDEHHQDLTLLKAFIRQQLPEKYKEIFFDESKNGYAGYID | |
| | GGASQEEFYKYIKKILEKLDGSEYFLDKIEREDFLRKQRTFDNGSIPHQIHL | |
| | QELHAILRRQEEFYPFLKENQEKIEKILTFRIPYYVGPLARGNSRFAWMSRK | |
| | SDETITPWNFEEVVDKEASAQAFIERMTNFDKNLPEEKVLPKHSLLYEKFTV | |
| | YNELTKVKYVTEGMGKPEFFDAEQKQEIVDGVFKKNRKVTKKQLLDFLFKEF | |
| | DEFRIVDISGVEDAFNASLGTYHDLLKIIKDKDELDNEENEDILEDIILTLT | |
| | LFEDREMIEERLQKYADLFDKKVLKKLERRRYTGWGRLSRKLINGIRDKQSG | |
| | KTILDYLISDGFANRNFMQLIHDDSLSFKEEIAKAQVIGETDSLHEHIANLA | |
| | GSPAIKKGILQTVKVVDELVKVMGRHKPENIVIEMARENQTTQKGQKNSRER | |
| | MKRIEEGIKELGSQILKEHPVENTQLQNEKLYLYYLQNGRDMYVDQELDINR | |
| | LSDYDVDHIVPQSFLKDDSIDNKVLTRSDKARGKSDNVPSEEVVKKMKNYWR | |
| | QLLNAKLITQRKFDNLTKAERGGLSELDKAGFIKRQLVETRQITKHVAQILD | |
| | SRMNTKYDENDKLIREVKVITLKSKLVSDFRKDFQFYKVREINNYHHAHDAY | |
| | LNAVVGTALIKKYPKLESEFVYGDYKVYDVRKMIAKSEQEIGKATAKYFFYS | |
| | NIMNFFKTEITLANGEIRKRPLIETNGETGEIVWDKGRDFATVRKVLSMPQV | |
| | NIVKKTEVQTGGFSKESILPKRDSDKLIARKKDWDTKKYGGFDSPTVAYSVL | |
| | VVADIEKGKSKKLKTVKELVGITIMERSAFEKNPVAFLEDKGYQNIQEDLII | |
| | KLPKYSLFELENGRKRLLASAGELQKGNELALPQKYVTLLYHAKHYEKLKEK | |
| | EEDEEKHLEYVEKHRDEFKEIVDQISEFSERYILADKNLEKIKELYSENEEA | |
| | SIEELASSFINLLTFTALGAPAAFKFLGATIDRKRYTSTKEILNATLIHQSI | |
| | TGLYETRIDLSKLGGD | |
| CasEnd-300 | MDKKYSIGLDIGTNSVGWAVITDEYKVPSKKFKVLGNTDRHSIKKNLIGALL | 260 |
| | FDSGETAEATRLKRTARRRYTRRKNRICYLQEIFSNEMAKVDDSFFHRLEES | |
| | FLVEEDKKHERHPIFGNIVDEVAYHEKYPTIYHLRKKLVDSTDKADLRLIYL | |
| | ALAHMIKFRGHFLIEGDLNPDNSDVQKTFKELLDTYNQLFEESPLDEEEVDA | |
| | KAILTEKISKSRRLENLIAEFPGEKKNGKFGNLLALSLGLTPNFKSNEDLSE | |
| | DAKLQFSKDTYDEDLEELLGQIGDQYADLFVAAKKLYDAILLSGILTVNTEI | |
| | TKAPLSASMIKRYDEHHQDLTLLKALVRQQLPEKYKEIFFDQSKNGYAGYID | |
| | GGASQEEFYKFIKPILEKMDGTEELLVKLNREDLLRKQRTFDNGSIPHQIHL | |
| | GELHAILRRQEDFYPFLKDNREKIEKILTFRIPYYVGPLARGNSRFAWMTRK | |
| | SEETITPWNFEEVVDKGASAQSFIERMTNFDKNLPNEKVLPKHSLLYEYFTV | |
| | YNELTKVKYVTEGMRKPAFLSGEQKKAIVDLLFKTNRKVTVKQLKEDYFKKI | |
| | ECFDSVEISGVEDRFNASLGTYHDLLKIIKDKDELDNEENEDILEDIVLTLT | |
| | LFEDREMIEERLKTYAHLFDDKVMKQLKRRRYTGWGRLSRKLINGIRDKQSG | |
| | KTILDFLKSDGFANRNFMQLIHDDSLTFKEDIQKAQVSGQGDSLHEHIANLA | |
| | GSPAIKKGILQTVKVVDELVKVMGRHKPENIVIEMARENQTTQKGQKNSRER | |
| | MKRLEEAIKELGSKILKEYPVDNTKLQNEKLYLYYLQNGKDMYTGEPLDIDN | |
| | LSDYDVDHIVPQSFLKDDSIDNKVLVSSEEARGKSDDVPSEAVVRKMKGFWS | |
| | KLLEAKLITQRKFDNLTKAERGGLSELDKAGFIKRQLVETRQITKHVAQILD | |
| | SRMNTKYDENDKLIREVKVITLKSKLVSDFRKDFQFYKVREINNYHHAHDAY | |
| | LNAVVGTALIKKYPKLESEFVYGDYKVYDVRKMIAKSEQEIGKATAKYFFYS | |
| | NIMNFFKTEITLANGEIRKRPLIETNGETGEIVWDKGRDFATVRKVLSMPQV | |
| | NIVKKTEVQTGGFSKESILPKRNSDKLIARKKDWDPKKYGGFDSPTVAYSVL | |
| | VVAKVEKGKSKKLKSVKELLGITIMERSSFEKNPIDFLEAKGYKEVKKDLII | |
| | KLPKYSLFELENGRKRMLASAGELQKGNELALPSKYVNFLYLASHYEKLKGS | |
| | PEDNEQKQLFVEQHKHYLDEIIEQISEFSKRVILADANLDKVLSAYNKHRDK | |
| | PIREQAENIIHLFTLTNLGAPAAFKYFDTTIDRKRYTSTKEVLDATLIHQSI | |
| | TGLYETRIDLSQLGGD | |
| CasEnd-301 | MKKKYSIGLDIGTNSVGWAVITDEYKVPSKKFKVLGNTDRQSIKKNLLGALL | 261 |
| | FDSGETAEATRLKRTARRRYTRRKNRIRYLQEIFAEEMSKVDDSFFQRLEES | |
| | FLVEEDKRYERHPIFGNIVDEVAYHEKYPTIYHLRKKLADSTDKADLRLIYL | |
| | ALAHIIKFRGHFLIEGDLNSENSDVQKLFIQLVQTYNQLFEENHISEEGVDA | |
| | KAILTDKLSKSRRLENLIALLPNEKKNGLFGNLIALSLGLTPNFKSNFDLAE | |
| | DAKLQFSKDTYDEDLDNLLAQIGDQYADLFLAAKNLSDAILLSDILTVNDEI | |
| | TKAPLSASMIKRYDEHHQDLTLLKKLVRQQLPEKYKEIFFDDSKNGYAGYID | |
| | GGASQEEFYKYIKPILEKMDGTEELLAKINREDLLRKQRTFDNGSIPHQIHL | |
| | KELHAILRRQEDFYPFLKENQEKIEKILTFRIPYYVGPLARGNSRFAWMKRK | |
| | SEETITPWNFEEVVDKEASAQAFIERMTNFDKNLPNEKVLPKHSLLYEYFTV | |
| | YNELTKVKYVTEGMRKPEFFSGEQKKEIVDLLFKTNRKVTVKQLKEDYFKEI | |
| | ECFDSVEISGVEDRFNASLGTYHDLLKIIKDKDFLDNEENEDILEDIVLTLT | |
| | LFEDREMIEERLEKYADLFDKKVLKQLKRRRYTGWGRLSRKLINGIRDKQSG | |
| | KTILDFLKDDGFANRNFMQLIHDDSLTFKEEIQKAQVIGQKDSLHETIANLA | |
| | GSPAIKKGILQSVKIVDELVKVMGRHKPENIVIEMARENQTTQKGQKNSRER | |
| | MKRIEEGIKELGSQILKEHPVENTQLQNEKLYLYYLQNGRDMYVDQELDINR | |
| | LSDYDVDHIVPQSFLKDDSIDNKVLTRSDKARGKSDNVPSEEVVKKMKNYWR | |
| | QLLNAKLITQRKFDNLTKAERGGLSELDKAGFIKRQLVETRQITKHVAQILD | |
| | SRFNTKIDENDKLIRDVKIITLKSKLVSDFRKDFQLYKVREINDYHHAHDAY | |
| | LNAVVGTALIKKYPKLESEFVYGDYKVYDVRKMIAKSEQEIGKATAKYFFYS | |
| | NIMNFFKSEITLANGEIRKRPDIETNEETGEIVWDKVKDFATVKKVLSMPQV | |
| | NIVKKTEVQTGGFSKESILPKRNSDKLIARKKDWDTKKYGGFDSPTVAYSVL | |
| | VVADVEKGKSKKLKTVKELVGITIMERSSFEKDPIAFLEAKGYQNIQEDLII | |
| | KLPKYSLFELENGRKRLLASAGELQKGNELALPQHYVTFLYHASNYEKLKGS | |
| | SEDNPQHLEYVEQHRHYFDEILDQISEFSERYILADKNLEKILELYAENEDK | |
| | SINELAENFIHLFTFTSLGAPAAFKFFGTTIDRKRYTSTTEVLDATLIHQSI | |
| | TGLYETRIDLSQLGGD | |
| CasEnd-302 | MDKKYSIGLDIGTNSVGWAVITDEYKVPSKKFKVLGNTDRHSIKKNLIGALL | 262 |
| | FDSGETAEATRLKRTARRRYTRRKNRICYLQEIFSNEMAKVDDSFFHRLEES | |
| | FLVEEDKKHERHPIFGNIVDEVAYHEKYPTIYHLRKKLVDSTDKADLRLIYL | |
| | ALAHMIKFRGHFLIEGDLNPDNSDVQKLFLQLIQAYDQTFEESPLDEEEIDA | |
| | EAILTEKLSKSRRLENLLAKFPGEKKNGLFGNILKLSVGLTPNFKSNEDLEE | |
| | DAKLQFSKDTYDEDLENLLGQIGDEYADLFVAAKKLYDAILLSGILTVNTEI | |
| | TKAPLSASMIKRYDEHHQDLTLLKALVRQQLPEKYKEIFFDQSKNGYAGYID | |
| | GGASQEEFYKFIKPILEKMDGTEELLVKLNREDLLRKQRTFDNGSIPHQIHL | |
| | GELHAILRRQEDFYPFLKDNREKIEKILTFRIPYYVGPLARGNSRFAWMTRK | |
| | SEETITPWNFEEVVDKGASAQSFIERMTNFDKNLPNEKVLPKHSLLYEYFTV | |
| | YNELTKVKYVTEGMRKPAFLSGEQKKAIVDLLFKTNRKVTVKQLKEDYFKKI | |
| | ECFDSVEISGVEDRFNASLGTYHDLLKIIKDKDELDNEENEDILEDIVLTLT | |
| | LFEDREMIEERLKTYAHLFDDKVMKQLKRRRYTGWGRLSRKLINGIRDKQSG | |
| | KTILDFLKSDGFANRNFMQLIHDDSLTFKEDIQKAQVSGQGDSLHEHIANLA | |
| | GSPAIKKGILQTVKVVDELVKVMGRHKPENIVIEMARENQTTQKGQKNSRER | |
| | MKRLEENIKELGSNILKEHPVDNTQLQNDKLYLYYLQNGKDMYTGEELDIDN | |
| | LSDYDVDHIVPQSFLKDDSIDNRVLVSSKEARGKSDDVPSEAVVSKMKPFWS | |
| | KLLEAKLITQRKFDNLTKAERGGLSELDKAGFIKRQLVETRQITKHVAQILD | |
| | SRMNTKYDENDKLIREVKVITLKSKLVSDFRKDFQFYKVREINNYHHAHDAY | |
| | LNAVVGTALIKKYPKLESEFVYGDYKVYDVRKMIAKSEQEIGKATAKYFFYS | |
| | NIMNFFKTEITLANGEIRKRPLIETNGETGEIVWDKGRDFATVRKVLSMPQV | |
| | NIVKKTEVQTGGFSKESILPKRNSDKLIARKKDWDPKKYGGFDSPTVAYSVL | |
| | VVAKVEKGKSKKLKSVKELLGITIMERSSFEKNPIDFLEAKGYKEVKKDLII | |
| | KLPKYSLFELENGRKRMLASAGELQKGNELALPSKYVNFLYLASHYEKLKGS | |
| | PEDNEQKQLFVEQHKHYLDEIIEQISEFSKRVILADANLDKVLSAYNKHRDK | |
| | PIREQAENIIHLFTLINLGAPAAFKYFDTTIDRKRYTSTKEVLDATLIHQSI | |
| | TGLYETRIDLSQLGGD | |
| CasEnd-303 | MKKKYSIGLDIGTNSVGWAVITDEYKVPSKKFKVLGNTDRHSIKKNLLGALL | 263 |
| | FDSGETAEATRLKRTARRRYTRRKNRIRYLQEIFAEEMSKVDDSFFHRLEES | |
| | FLVEEDKRFERHPIFGNIVDEVAYHEKYPTIYHLRKKLADSDEKADLRLIYL | |
| | ALAHIIKFRGHFLIEGDLNAENSDVQKLFIQLVQTYNQLFEESPIDEEGVDA | |
| | KAILTAKLSKSRRLENLIAQLPGEKKNGLFGNLIALSLGLTPNFKSNFDLAE | |
| | DAKLQLSKDTYDEDLDNLLAQIGDQYADLFLAAKNLSDAILLSDILTVNSES | |
| | TKAPLSASMIKRYDEHHQDLTLLKELVREQLPEKYKEIFFDESKNGYAGYID | |
| | GGASQEEFYKYIKPILEKLDGSEELLDKLNREDFLRKQRTFDNGSIPHQIHL | |
| | GELHAILRRQEEFYPFLKENREKIEKILTFRIPYYVGPLARGNSRFAWMTRK | |
| | SEETITPWNFEEVVDKEASAQAFIERMTNFDKNLPEEKVLPKHSLLYEYFTV | |
| | YNELTKVKYVTEGMRKPEFLSGEQKEAIVDLLFKKNRKVTVKQLKEDYFKEI | |
| | ECFDSVEISGVEDRFNASLGTYHDLLKIIKDKDFLDNEENEDILEDIVLTLT | |
| | LFEDREMIEERLKKYEHLFDKKVLKQLKRRRYTGWGRLSAKLINGIRDKQSG | |
| | KTILDYLKDDGFANRNFMQLIHDDSLTFKELIQKAQVIGKGDSLHEVIANLA | |
| | GSPAIKKGILQSLKIVDELVKVMGRHNPENIVIEMARENQTTQKGQKNSRER | |
| | MKRIEEGIKELGSQILKEHPVENTQLQNEKLYLYYLQNGRDMYVDQELDINR | |
| | LSDYDVDHIVPQSFLKDDSIDNKVLTRSDKARGKSDNVPSEEVVKKMKNYWR | |
| | QLLNAKLITQRKFDNLTKAERGGLSELDKAGFIKRQLVETRQITKHVAQILD | |
| | SRFNTERDENDKLIREVKIITLKSKLVSDFRKDFQFYKVREINDYHHAHDAY | |
| | LNAVVGTALIKKYPKLESEFVYGDYKVYDVRKMIAKSDSEIGKATAKYFFYS | |
| | NIMNFFKTEITLANGTIRKRPLIEVNEETGEIVWNKEKDFATVRKVLSMPQV | |
| | NIVKKTEVQTGGFSKESILPKRNSDKLIARKKDWDPKKYGGFDSPTVAYSVL | |
| | VVAKVEKGKAKKLKTVKELVGITIMERSKFEKDPIAFLESKGYKNIQKDLII | |
| | KLPKYSLFELENGRKRLLASAGELQKGNELALPNHYVTLLYLAKNYEKLKGK | |
| | PEDNEQKLEYVEQHKHEFKEIFDQISEFSERYILADKNLEKLKSLYNENEDS | |
| | DISELAENFIHLFTFTSLGAPAAFKFFDKDIDRKRYTSTTEVLNATLIHQSI | |
| | TGLYETRIDLSQLGGD | |
| CasEnd-304 | MKKKYSIGLDIGTNSVGWAVITDEYKVPSKKFKVLGNTDRQSIKKNLLGALL | 264 |
| | FDSGETAEATRLKRTARRRYTRRKNRICYLQEIFAEEMNKVDDSFFHRLEES | |
| | FLVEEDKKHERHPIFGNIVDEVAYHEKYPTIYHLRKKLADSTEKADLRLIYL | |
| | ALAHIIKFRGHFLIEGDLNSENTDVQKLFIQLVQTYNQLFEENPINEEGIDA | |
| | KAILSAKLSKSRRLENLIAQIPGEKKNGLFGNLIALSLGLTPNFKSNEDLSE | |
| | DAKLQLSKDTYDEDLDNLLAQIGDQYADLFLAAKNLSDAILLSDILTVNSEI | |
| | TKAPLSASMIKRYDEHHQDLTLLKALVREQLPEKYKEIFFDKSKNGYAGYID | |
| | GGASQEEFYKYIKPILEKMDGTEELLAKINREDFLRKQRTFDNGSIPHQIHL | |
| | GELHAILRRQEKFYPFLKENREKIEKILTFRIPYYVGPLARGNSRFAWMTRK | |
| | SDETITPWNFEEVVDKGASAQAFIERMTNFDKNLPNEKVLPKHSLLYEYFTV | |
| | YNELTKVKYVTEGMGKPEFLSAEQKEEIVDLLFKTNRKVTVKQLKEFYFKEI | |
| | ECFDSVEISGVEDRFNASLGTYHDLLKIIKDKDFLDNEENEDILEDIILTLT | |
| | LFEDREMIEERLKKYADLFDKKVLKKLKRRRYTGWGRLSKKLINGIRDKQSG | |
| | KTILDFLKDDGFANRNFMQLIHDDSLTFKEEIKKAQVIGQTDSLHETIANLA | |
| | GSPAIKKGILQTVKIVDELVKVMGRHKPENIVIEMARENQTTQKGQKNSRER | |
| | MKRLEEGVKELGSQILKEHPVENTQLQNEKLYLYYLQNGKDMYTGQELDIDR | |
| | LSDYDVDHIIPQSFIKDDSIDNKVLTSSEEARGKSDNVPSEEVVKKMKSYWQ | |
| | QLLKAKLISQRKFDNLTKAERGGLSELDKAGFIKRQLVETRQITKHVAQILD | |
| | SRFNTKFDENDKLIRDVKIITLKSKLVSDFRKDFGFYKVREINDYHHAHDAY | |
| | LNAVVGTALIKKYPKLESEFVYGDYKVYDLRKMIGKSEKEIGKATAKMFFYS | |
| | NIMNFFKSEIKLANGEIRKRPVIEVNEETGEIVWDKEKDFATVRKVLSMPQV | |
| | NIVKKTEVQTGGFSKESILPKRNSDKLIARKKDWDPKKYGGFDSPTVAYSVL | |
| | VVAKVEKGKSKKLKTVKELVGITIMERSSFEKNPVKFLEAKGYKNIQKDLII | |
| | KLPKYSLFELENGRKRLLASAGELQKGNELALPSKYVTFLYHASHYEKLKGK | |
| | PEDNEKKREYVEQHLHYFDEIFDQISEFSKRYILADKNLEKIKSTYNKNRNY | |
| | SIREQAESIINLFTFTALGAPAAFKFFDTTIDRKRYTSTKEVLDSTLIHQSI | |
| | TGLYETRIDLSQLGGD | |
| CasEnd-305 | MDKKYSIGLDIGTNSVGWAVITDDYKVPSKKMKVLGNTNKQSIKKNLLGALL | 265 |
| | FDSGETAEATRLKRTARRRYTRRKNRIRYLQEIFSSEMEKVDDSFFHRLKES | |
| | FLVTEDKKNERHPIFGNIVDEVAYHENYPTIYHLRKKLADSTEKADLRLIYL | |
| | AVAHMIKFRGHFLIQGDLNSDNSDVDKLFEQLVETYNELFGESPINTSGVDA | |
| | KTILSARLSKSRRLENLIAQYPGEKKNGLFGNLIALSLGLTPNFKSNEDLAE | |
| | DAKLQFSKDTYDDDLDGLLGQIGDQYADLFLAAKNLSDAILLSDILRVDSVV | |
| | TKAPLSASMIKRYNEHHQDLALLKKLVREQFPEKYKEIFSDQSKNGYAGYID | |
| | GGASQEEFYKFIKPILEKMDETEYFLAKLNREDLLRKQRTFDNGSIPHQIHL | |
| | GELHAILRRQSEHYPFLKENREKIEKILTFRIPYYVGPLARGNSRFAWMKRK | |
| | SNETITPWNFSQVVDKGESAESFITRMTNFDKYLPTEKVLPKHSLLYEYYTV | |
| | YNELTKVKYVTEQRKPKFFSGNVKQRIFDLLFKANRKVTVKQLLEDYKQEFY | |
| | SCDSVEISGLENRFNASLGTYHDLLKIIKDKDFLDNEENQDILEDIVLTLTL | |
| | FEDKEMIRERLKKYAHLEDDKVMKQLERRHYTGWGRLSKKLINGIRDKQSGK | |
| | TILDYLKSDGLSNRNFMQLIHDKSLTFKERIAKANESAQTDSLEEQIAALAG | |
| | SPAIKKGILQTVKVVDELVKVMGHKPENIVIEMARENQTTQEGQKNSRERMK | |
| | RILTGLKELGSDILKKHPVENTQLQNDKLYLYYLQNGRDMYTGQPLDINRLS | |
| | DYDVDHIVPQSFIKDNSFDNKVLTRSDEARGKSDNVPSSEVVKKMKSFWRQL | |
| | LEAKLITQRKYDNLTKAERGGLSELDKAGFIKRQLVETRQITKHVAQILDSR | |
| | MNTKRDKNDKPIRDVKIITLKSKLVSDFRKDFQFYKVREINNYHHAHDAYLN | |
| | AVVGTALIKKYPKLESEFVYGDYKVYDVRKMIAKSEQEIGKATQKRFFYSNI | |
| | MNFFKTDITLANGTIRKRPLIETNTETGEIVWDKGKDLATVRKVLSMPQVNI | |
| | VKKTEVQTGGLYKESILPKREFAKLISRKKRFDSSKYGGEDSPTVAYSVLVI | |
| | AKVEKGKTKKLKTVKTLVGITIMERLSFEKDPVSFLNDKGYKEVKKDKIIKL | |
| | PKYSLFEFENGRRRLLASNGELQKANELVLPAKFVNFLYHAQRISTSKESEN | |
| | DNEKEQEYVDEHRYELQSLFSYIERFAERVILAEKNLEKLKSLFENFESKPI | |
| | RSQCESFIHLFTFTNLGAPAAFKYLNTTIERKRYTSTKSILDSTLIHQSITG | |
| | LYETRIDLSQLGGD | |
| CasEnd-306 | MDKKYSIGLDIGTNSVGWAVITDEYKVPSKKFKVLGNTDRHSIKKNLIGALL | 266 |
| | FDSGETAEATRLKRTARRRYTRRKNRICYLQEIFSNEMAKVDENFFHRLEES | |
| | FLVEEDKRGERHPIFGNIVEEVAYHEKYPTIYHLRKHLADSPEKADLRLVYL | |
| | ALAHIIKFRGHFLIEGDLDAENTDVQKLFKELLEVYDRTFEESHLEEETVDI | |
| | EAILTEKLSKSRRLENLIANFPNEKKNGLFGELLKLIVGLTPNFKSNEDLEE | |
| | DAKLQFSKDTYDEDLEELLGQIGDEYADLFESAKKLYDAILLSGILTVDDNS | |
| | TKAPLSASMVKRYDEHHQDLTLLKQFIRKQLPDKYKEIFFDQSKNGYAGYID | |
| | GGASQEEFYKYLKKLLEKIEGSEYFLEKIEREDFLRKQRTFDNGSIPHQIHL | |
| | QELKAIIRRQGEYYPFLKENQEKIEKILTFRIPYYVGPLARGNSRFAWLSRK | |
| | SDETITPWNFDEIVDKEKSAEAFITRMTNFDKNLPDEKVLPKHSLLYEKFTV | |
| | YNELTKVKYVTEQGKKPEFFDANMKQEIFEGVFKKYRKVTKKQLLDYLKKEF | |
| | DEFRIVDISGVEDRFNASLGTYHDLKKILFDKEFLDDPANEKILEDIILTLT | |
| | LFEDREMIKKRLEKYSDLLTKEQLKKLERRRYTGWGRLSAKLINGIRDKETG | |
| | KTILDYLIDDGYANRNFMQLIHDDNLSFKEEIAKAQVIGETDSLHEHIANLA | |
| | GSPAIKKGILQTVKVVDELVKVMGRHKPENIVIEMARENQTTQKGQKNSRER | |
| | MKRIEEGIKELGSQILKEHPVENTQLQNEKLYLYYLQNGRDMYVDQELDINR | |
| | LSDYDVDHIVPQSFLKDDSIDNKVLTRSDKARGKSDNVPSEEVVKKMKNYWR | |
| | QLLNAKLITQRKFDNLTKAERGGLSELDKAGFIKRQLVETRQITKHVAQILD | |
| | SRMNTKYDENDKLIREVKVITLKSKLVSDFRKDFQFYKVREINNYHHAHDAY | |
| | LNAVVGTALIKKYPKLESEFVYGDYKVYDVRKMIAKSEQEIGKATAKYFFYS | |
| | NIMNFFKTEITLANGEIRKRPLIETNGETGEIVWDKGRDFATVRKVLSMPQV | |
| | NIVKKTEVQTGGFSKESILPKRDSDKLIARKKDWDTKKYGGFDSPTVAYSVL | |
| | VIADIEKGKAKKLKTVKELVGITIMERSKFEKDPVAFLEDKGYQNIQEDNLI | |
| | KLPKYSLFELENGRKRLLASAGELQKGNELALPNHYVTLLYHAKNYEKVKGK | |
| | EEDIEEHLIYVEEHRDEFKELLDQVKEFSERYILADANIEKLKKLYEKNDSA | |
| | SIEELAENFIHLLTFTALGAPAAFKFFGKSIDRKRYTSTKEILNATLIHQSI | |
| | TGLYETRIDLSKLGGD | |
| CasEnd-307 | MKKPYSIGLDIGTNSVGWAVVTDDYKVPSKKMKVLGNTDRSSIKKNLLGALL | 267 |
| | FDSGETAEATRLKRTARRRYTRRKNRILYLQEIFAEEMNKVDDSFFHRLEDS | |
| | FLVEEDKRGERHPIFGNIVEEVAYHEKFPTIYHLRKHLADSTEKADLRLVYL | |
| | ALAHIIKFRGHFLIEGDLNIENTDVQKLFKKFVEVYDRTFEESHLSEETVDA | |
| | ESILTEKVSKSRRLENLIKLFPNEKKNGLFGNLIALSLGLQPNFKTNFKLSE | |
| | DAKLQFSKDTYEEDLENLLGQIGDEYADLFIAAKNLYDAILLSGILTVNDSS | |
| | TKAPLSASMIKRYEEHHEDLTKLKAFIRKQLPEKYKEIFFDETKNGYAGYID | |
| | GGTKQEEFYKYLKKLLSKIDGSEYFLDKIEREDFLRKQRTFDNGSIPHQIHL | |
| | QELHAILRRQAEYYPFLKENQEKIEKILTFRIPYYVGPLARGNSRFAWASRK | |
| | SDETITPWNFDEVIDKEASAEAFIERMTNNDLYLPEEKVLPKHSLLYEKFTV | |
| | YNELTKVKYVTEQMGKAKFFDANMKQEIFDGLFKKYRKVTKKKLLDFLDKEF | |
| | DEFRIVDISGVEKAFNASLGTYHDLLKIIKDKDFLDNEENEDILEDIVLTLT | |
| | LFEDREMIRKRLSKYEDLFTKKQLKKLERRHYTGWGRLSAKLINGIRDKQTG | |
| | KTILDYLIDDGHANRNFMQLIHDDNLSFKEEIAKAQVIGETDSLHEVVAELA | |
| | GSPAIKKGILQSLKIVDELVKVMGRYNPENIVVEMARENQTTNKGQRNSRER | |
| | LKRLEEAIKELGSKILKEHPVENQQLQNDRLYLYYLQNGKDMYTGEELDIDK | |
| | LSQYDVDHIIPQSFIKDDSIDNRVLTSSAKARGKSDDVPSIEVVRKMKSFWS | |
| | KLLNAKLISQRKFDNLTKAERGGLTEDDKAGFIKRQLVETRQITKHVAQILD | |
| | ERFNTEFDENNKLIRDVKIITLKSKLVSQFRKEFELYKVREINDYHHAHDAY | |
| | LNAVVGTALIKKYPKLEPEFVYGDYPKYNSYKLIAKSDKERGKATAKMFFYS | |
| | NIMNFFKTKVKLADGQVIERPVIEVNEETGEIVWDKTKHIATVKKVLSMPQV | |
| | NIVKKTEVQTGGFSKESILPKRDSDKLIARKKKWDTKKYGGFDSPTVAYSVL | |
| | VVADIEKGKAKKLKTVKELVGITIMERSAFEKNPVAFLEDKGYQNIQEEKII | |
| | KLPKYSLFELENGRKRLLASAGELQKGNELALPNKLVTLLYHAKRIEKLDEK | |
| | PEDIEKHLEYVEAHKDEFKELLNQISEFSERYILADKNLEKIEELYEKNDEA | |
| | SIEELASSFINLLTFTALGAPADFKFFGKNIDRKRYTSTKEILNATLIHQSI | |
| | TGLYETRIDLSKLGGD | |
| CasEnd-308 | MKKPYSIGLDIGTNSVGWAVITDDYKVPAKKMKVLGNTDKSHIKKNLLGALL | 268 |
| | FDSGNTAEDRRLKRTARRRYTRRRNRILYLQEIFSEEMAKVDESFFHRLEDS | |
| | FLVPEDKRGERHPIFGNIAEEVAYHKQFPTIYHLRKHLADSSEKADLRLVYL | |
| | ALAHIIKFRGHFLIEGKLDSENTDVQHLFKAFVEVYDNTFEESHLSEQTVDA | |
| | EEILTEKISKSRRLERLLKLFPNEKKNGLFGNFLALIVGLQPNFKSNFELSE | |
| | DAKLQFSKDTYEEDLEGLLGQIGDEYADLFVAAKNLYDAILLSGILTVKDVS | |
| | TKAPLSASMVKRYEEHQADLALLKKFIKQNLPDKYKEVFSDVSKNGYAGYID | |
| | GKTSQEDFYKYLKNLLSKVEGSDYFLDKIEREDFLRKQRTFDNGSIPHQIHL | |
| | QEMHAILRRQGEYYPFLKENQEKIEKILTFRIPYYVGPLARGNSRFAWASRK | |
| | SDEKITPWNFDEIVDKESSAEAFIERMTNYDLYLPNEKVLPKHSLLYEKFTV | |
| | YNELTKVKYITEQFGKYEFFDANMKQEIFDGVFKEERKVTKDKLKEFLDKEF | |
| | DEFRIVDLTGLDKAFNASLGTYHDLLKIIKDKDFLDNSENEKILEDIVLTLT | |
| | LFEDREMIRKRLQKYSDLFTKEQLKKLERRHYTGWGRLSAKLINGIRDKQSN | |
| | KTILDYLIDDGKSNRNFMQLINDDSLSFKEEIAKAQVIGETDNLHQVVSDLA | |
| | GSPAIKKGILQSLKIVDELVKVMGRYNPENIVVEMARENQTTNKGRRNSQQR | |
| | LKRLTDSIKELGSKILKEHPVDNSQLQNDRLFLYYLQNGRDMYTGEELDIDR | |
| | LSQYDIDHIIPQAFIKDDSIDNRVLTSSAKARGKSDDVPSEEVVKKMKSFWS | |
| | KLLSAKLISQRKFDNLTKAERGGLTDDDKAGFIKRQLVETRQITKHVARILD | |
| | ERFNTEFDENNKKIRKVKIVTLKSNLVSQFRKEFELYKVREINDYHHAHDAY | |
| | LNAVVGKALLKKYPKLEPEFVYGEYPKYNSYKLNGKSANERNKATAKMFFYS | |
| | NIMNFFKSDIKLADGEIVERPQIEANDETGEIAWDKTKHFATVRKVLSYPQV | |
| | NIVKKVEEQTGGFSKESILPKGDSDKLIPRKTKWDTKKYGGFDSPIVAYSVL | |
| | VIADIEKGKSKKLKTVKELVGITIMEKHPFEKNPVAFLERKGYRNIQEENII | |
| | KLPKYSLFELENGRRRLLASARELQKGNEAVLPNHLVTLLYHAKNIHKIDEK | |
| | EEPFPKHLEYVEKHRDEFLELLDIIESFSKKYVLAEKNLEKIEELYEKNNEK | |
| | DIEELASSFINLLTFTALGAPAAFKFFDKNIDRKRYTSTAECLNATLIHQSI | |
| | TGLYETRIDLSKLGGD | |
| CasEnd-309 | MDKKYSIGLDIGTNSVGWAVITDEYKVPSKKFKVLGNTDRHSIKKNLLGALL | 269 |
| | FDSGETAEATRLKRTARRRYTRRKNRIRYLQEIFAEEMSKVDDSFFQRLEES | |
| | FLVEEDKRFERHPIFGNIVDEVAYHEEYPTIYHLRKHLADSDEKADLRLIYL | |
| | ALAHIIKFRGHFLIEGPLNSENSDVQKLFIQFVETYNQLFEESPLEEEGVDI | |
| | KAILTAKLSKSRRLENLIANLPNEKKNGLFGNLLALSLGLTPNFKSNFELSE | |
| | DAKLQFSKDTYDEDLENLLAQIGDQYADLFIAAKNLSDAILLSGILTVKTEI | |
| | TKAPLSASMIKRYDEHHQDLTLLKALVREQLPEKYKEIFFDQTKNGYAGYID | |
| | GGASQEDFYKYIKNILEKLDGSEYFLDKINREDFLRKQRTFDNGSIPHQIHL | |
| | QELRAILRRQEEFYPFLKENQEKIEKILTFRIPYYVGPLARGNSRFAWMKRK | |
| | SEETITPWNFEEVVDKEASAQLFIERMTNFDKNLPNEKVLPKHSLLYEKFTV | |
| | YNELTKVKYVTEGMRKPAFFSAGQKEEIVDLLFKKNRKVTVKQLKEYLFKKI | |
| | ECFDSVEISGVEDKFNASLGTYHDLLKIIKDKDFLDNEENEDILEDIVLTLT | |
| | LFEDREMIEKRLAKYAHLFDKKVLKKLKRRRYTGWGRLSAKLINGIRDKQTG | |
| | KTILDYLIDDGFANRNFMQLIHDDSLTFKEEIKKAQVIGQGDSLHEVIANLA | |
| | GSPAIKKGILQSLKIVDELVKVMGRHSPENIVIEMARENQTTQKGQKNSRER | |
| | LKRLEEVIKKLGSKILKEHPVDNTQLQNDKLYLYYLQNGRDMYTGQELDIDR | |
| | LSDYDVDHIIPQSFIKDDSIDNRVLTSSGKARGKSDDVPSEEVVKKMKNFWR | |
| | QLLNSKLISQRKFDNLTKAERGGLTELDKAGFIKRQLVETRQITKHVAQILD | |
| | SRFNTKYDENDKLIREVKIITLKSKLVSDFRKDFGFYKVREINDYHHAHDAY | |
| | LNAVVGTALIKKYPKLESEFVYGDYKVYNVRKMIAKSEQEIGKATAKYFFYS | |
| | NIMNFFKSDVTLANGEIRKRPLIETNEETGEIVWDKTKDIATVKKVLSMPQV | |
| | NIVKKTEVQTGGFSKESILPKRNSDKLIARKKDWDTKKYGGFDSPTVAYSVL | |
| | VVADVEKGKAKKLKTVKELVGITIMERSAFEKDPVGFLEDKGYQNIQKDLII | |
| | KLPKYSLFELENGRKRLLASAGELQKGNELALPQKYVILLYHAKNYEKLKGS | |
| | PEDNEKHLEYVEQHRHEFDEILNQIIEFSERYILADKNLEKIEELYKENNDS | |
| | PIEELASSFLNLFTFTSLGAPAAFKFFGTDIDRKRYTSTTEILNATLIHQSI | |
| | TGLYETRIDLSQLGGD | |
| CasEnd-310 | MDKPYSIGLDIGTNSVGWAVITDEYKVPSKKFKVLGNTDRHSIKKNLIGALL | 270 |
| | FDSGETAEATRLKRTARRRYTRRKNRIRYLQEIFAEEMNKVDDSFFHRLEES | |
| | FLVEEDKRGERHPIFGNIVDEVAYHEKYPTIYHLRKHLADSPEKADLRLIYL | |
| | ALAHIIKFRGHFLIEGDLKAENTDVQKLFEDLVQTYNNTFEESALSEELVDA | |
| | FAILTAKVSKSRRLENLIKDYPNEKKNGLFGNLIALSLGLTPNFKTNFELSE | |
| | DAKLQFSKDTYDEDLENLLGQIGDQYADLFLAAKNLYDAILLSGILTVKTEI | |
| | TKAPLSASMVKRYDEHHQDLTLLKQFIRQNLPEKYKEIFFDKSKNGYAGYID | |
| | GGASQEEFYKYIKKILEKIDGSEYFLDKIEREDFLRKQRTFDNGSIPHQIHL | |
| | QELKAILRRQEKFYPFLKENQEKIEKILTFRIPYYVGPLARGNSRFAWLSRK | |
| | SDETITPWNFEEIVDKEASAQAFIERMTNYDKNLPEEKVLPKHSLLYEKFTV | |
| | YNELTKVKYVTEGMRKPAFLDAGQKQEIVDLLFKKNRKVTVKQLKEFLFKEI | |
| | DCFDIVEISGVEDRFNASLGTYHDLLKIIKDKDFLDNEENEEILEDIVLTLT | |
| | LFEDREMIEERLSKYADLFDKKVLKKLERRRYTGWGRLSAKLINGIRDKQSG | |
| | KTILDYLIDDGFANRNFMQLIHDDSLSFKEEIQKAQVIGQTDSLHEVIANLA | |
| | GSPAIKKGILQSIKIVDELVKVMGRHEPENIVVEMARENQTTQKGQKNSRER | |
| | LKRLEEAHKKLGSNILKEHPVENTQLQNDKLYLYYLQNGKDMYTGEELDIDR | |
| | LSDYDVDHIIPQSFIKDDSIDNRVLTSSKKARGKSDNVPSEDVVKKMKNFWE | |
| | KLLNAKLISQRKFDNLTKAERGGLTELDKAGFIKRQLVETRQITKHVAQILD | |
| | SRFNTKYDENDKLIRNVKIITLKSKLVSDFRKEFGFYKVREINDYHHAHDAY | |
| | LNAVVGTALIKKYPKLESEFVYGDYKVYNLYKMIAKSEQEIGKATAKYFFYS | |
| | NIMNFFKQEITLANGEIRKRPLIETNEETGEIVWDKAKDFATVRKVLSMPQV | |
| | NIVKKTEVQTGGFSKESILPKRDSDKLIARKKDWDTKKYGGFDSPTVAYSVL | |
| | VVADIEKGKAKKLKTVKELVGITIMERSSFEKDPIAFLEDKGYKNIQKENII | |
| | KLPKYSLFELENGRKRLLASAGELQKGNELALPQKYVTLLYHAHHYEKLKGS | |
| | PEDNEKHLEYVEQHRHEFDEILEQIIEFSERYILADKNLEKIQELYTKNSNA | |
| | DINELAESFINLLTFTALGAPAAFKFFGKDIDRKRYTSTTEILNATLIHQSI | |
| | TGLYETRIDLSQLGGD | |
| CasEnd-311 | MKKKYSIGLDIGTNSVGWAVITDEYKVPSKKFKVLGNTDRQSIKKNLIGALL | 271 |
| | FDSGETAEATRLKRTARRRYTRRKNRIRYLQEIFAEEMNKVDDSFFHRLEES | |
| | FLVEEDKRGERHPIFGNIVDEVAYHEKYPTIYHLRKKLVDSTEKADLRLIYL | |
| | ALAHMIKFRGHFLIEGDLNSENSDVQKLFIDLVQTYNQIFEESHLSESGVDA | |
| | KAILTEKLSKSRRLENLIAQFPNEKKNGLFGNLIALSLGLTPNFKSNENLSE | |
| | DAKLQFSKDTYDEDLENLLGQIGDEYADLFLAAKNLSDAILLSGILRVDDES | |
| | TKAPLSASMIKRYDEHHQDLTLLKALVRKQLPEKYKEIFFDKSKNGYAGYID | |
| | GGASQEEFYKYIKPILEKMDGTEYLLEKLEREDLLRKQRTFDNGSIPHQIHL | |
| | QELHAILRRQEEYYPFLKENQEKIEKILTFRIPYYVGPLARGNSRFAWMTRK | |
| | SEETITPWNFEEVVDKGASAQAFIERMTNFDKNLPEEKVLPKHSLLYEYFTV | |
| | YNELTKVKYVTEGMGKAEFLDANVKKEIVDGLFKKNRKVTVKKLKDFYFKEF | |
| | DEFRIVDISGVEDRFNASLGTYHDLLKIIKDKEFLDNEENEDILEDIVLTLT | |
| | LFEDREMIEKRLEKYANLFDKKQMKKLKRRRYTGWGRLSKKLINGIRDKQSG | |
| | KTILDFLIDDGFANRNFMQLIHDDSLTFKDEIKKAQVIGQSDSLHEQIADLA | |
| | GSPAIKKGILQTVKVVDELVKVMGRHKPENIVIEMARENQTTQKGQRNSRER | |
| | LKRIEEGIKELGSQILKEHPVENTQLQNDKLYLYYLQNGRDMYTGEELDIDR | |
| | LSDYDVDHIVPQSFIKDDSIDNKVLTRSKKARGKSDDVPSEEVVKKMKSYWR | |
| | QLLKAKLITQRKFDNLTKAERGGLTELDKAGFIKRQLVETRQITKHVAQILD | |
| | SRMNTERDENDKLIRDVKVITLKSKLVSDFRKDFQFYKVREINDYHHAHDAY | |
| | LNAVVGTALIKKYPKLESEFVYGDYPVYNSRKMIAKSEQEIGKATAKYFFYS | |
| | NIMNFFKTEITLANGEIRKRPLIETNGETGEIVWDKGRDFATVRKVLSMPQV | |
| | NIVKKTEVQTGGFSKESILPKRNSDKLIARKKDWDPKKYGGFDSPTVAYSVL | |
| | VVAKVEKGKSKKLKSVKELLGITIMERSSFEKNPIDFLEAKGYKEVKKDLII | |
| | KLPKYSLFELENGRKRMLASAGELQKGNELALPSKYVNFLYLASHYEKLKGS | |
| | PEDNEQKQLFVEQHKHYLDEIIEQISEFSKRVILADANLDKVLSAYNKHRDK | |
| | PIREQAENIIHLFTLTNLGAPAAFKYFDTTIDRKRYTSTKEVLDATLIHQSI | |
| | TGLYETRIDLSQLGGD | |
| CasEnd-312 | MKKPYSIGLDIGTNSVGWAVVTDDYKVPAKKMKVLGNTDKSHIKKNLLGALL | 272 |
| | FDSGNTAEDRRLKRTARRRYTRRRNRILYLQEIFSEEMGKVDDSFFHRLEDS | |
| | FLVTEDKRGERHPIFGNLEEEVAYHENFPTIYHLRKYLADNPEKADLRLVYL | |
| | ALAHIIKFRGHFLIEGKLDTRNNDVQRLFQEFLAVYDNTFENSSLQEQNVQV | |
| | EEILTDKISKSAKKDRVLKLFPNEKSNGRFAEFLKLIVGNQADFKKHFELEE | |
| | KAPLQFSKDTYEEDLEVLLAQIGDEYAELFLSAKKLYDSILLSGILTVTDVS | |
| | TKAPLSASMIKRYNEHQMDLAQLKQFIRQKLPDKYNEVESDVSKDGYAGYID | |
| | GKTNQEAFYKYLKKLLNKIEGSGYFLDKIEREDFLRKQRTFDNGSIPHQIHL | |
| | QEMRAIIRRQAEFYPFLKENQDKIEKILTFRIPYYVGPLARGKSDFAWLSRK | |
| | SADKITPWNFDEIVDKESSAEAFINRMTNYDLYLPNEKVLPKHSLLYEKFTV | |
| | YNELTKVKYKTEQMGKTAFFDANMKQEIFDGVFKVYRKVTKDKLMDFLEKEF | |
| | DEFRIVDLTGLDKAFNASYGTYHDLRKILKDKDFLDNSKNEKILEDIVLTLT | |
| | LFEDREMIRKRLENYSDLLTKEQLKKLERRHYTGWGRLSAKLIHGIRNKESR | |
| | KTILDYLIDDGNSNRNFMQLINDDALSFKEEIAKAQVIGETDNLNQVVSDIA | |
| | GSPAIKKGILQSLKIVDELVKIMGGHQPENIVVEMARENQFTNQGRRNSQQR | |
| | LKGLTDSIKELGSQILKEHPVENSQLQNDRLFLYYLQNGRDMYTGEELDIDY | |
| | LSQYDIDHIIPQAFIKDDSIDNRVLTSSAEARGKSDDVPSKDVVKKMKSYWS | |
| | KLLSAKLITQRKFDNLTKAERGGLTDDDKAGFIKRQLVETRQITKHVARILD | |
| | ERFNTETDENNKKIRQVKIVTLKSNLVSNFRKEFELYKVREINDYHHAHDAY | |
| | LNAVVGKALLKKYPKLEPEFVYGDYPKFNSHKIVSESKEEENKATAKKFFYS | |
| | NIMNFFKKDVKLADGQIVERPMIERNDENGEIVWDKDKHISNVKKVLSYPQV | |
| | NIVKKVEEQTGGFSKESILPKGNSDKLIPRKTKWDTKKYGGFDSPIVAYSVL | |
| | VIADIEKGKSKKLKTVKELVGITIMEKMTFEKNPVAFLERKGYQNIQEENII | |
| | KLPKYSLFELENGRKRLLASAKELQKGNEIVLPNHLVTLLYHAKNIHKIDEK | |
| | TEDIPKHLEYVEKHKDEFKELLDVVSNFSKKYTLAEGNLEKILELYAQNNSA | |
| | DIEELASSFINLLTFTALGAPATFKFFDKNIDRKRYTSTTEILNATLIHQSI | |
| | TGLYETRIDLSKLGGD | |
| CasEnd-313 | MKKPYSIGLDIGTNSVGWAVVTDDYKVPAKKMKVLGNTDKSHIKKNLLGALL | 273 |
| | FDSGNTAEDRRLKRTARRRYTRRRNRILYLQEIFSEEMGKVDDSFFHRLEDS | |
| | FLVPEDKRGERHPIFGNLEEEVKYHENFPTIYHLRKYLADNPEKADLRLVYL | |
| | ALAHIIKFRGHFLIEGKFDTRNNDVQRLFQEFLAVYDNTFENSSLQEQNVQV | |
| | EEILTDKISKSAKKDRVLKLFPNEKSNGRFAEFLKLIVGNQADFKKHFELEE | |
| | KAPLQFSKDTYEEDLEVLLGQIGDDYAELFLSAKKLYDSILLSGILTVTDVS | |
| | TKAPLSASMIKRYNEHQMDLTQLKQFIRQKLSDKYNEVFSDVSKDGYAGYID | |
| | GKTSQEAFYKYLKKLLNKIEGSEYFLDKIEREDFLRKQRTFDNGSIPHQIHL | |
| | QEMRAIIRRQAEFYPFLAENQDKIEKILTFRIPYYVGPLARGKSDFAWLSRK | |
| | SAEKITPWNFDEIVDKESSAEAFINRMTNYDLYLPNEKVLPKHSLLYEKFTV | |
| | YNELTKVKYKTEQMGKTAFFDANMKQEIFDGVFKVYRKVTKDKLMDFLEKEF | |
| | DEFRIVDLTGLDKAFNASLGTYHDLLKILNDKDFLDNSKNEKILEDIVLTLT | |
| | LFEDREMIRKRLENYSDLLTKEQLKKLERRHYTGWGRLSAKLIHGIRNKESR | |
| | KTILDYLIDDGNSNRNFMQLINDDALSFKEEIAKAQVIGETDNLNQVVSDLA | |
| | GSPAIKKGILQSLKIVDELVKIMGTHQPENIVVEMARENQFTNQGRRNSQQR | |
| | LKGLTDSIKELGSQILKEHPVENSQLQNDRLFLYYLQNGRDMYTGEELDIDY | |
| | LSQYDIDHIIPQAFIKDNSIDNRVLVSSKEARGKSDDVPSKDVVRKMKSYWS | |
| | KLLSAKLISQRKFDNLTKAERGGLTDDDKAGFIKRQLVETRQITKHVARILD | |
| | ERFNTETDENNKKIRQVKIVTLKSNLVSNFRKEFELYKVREINDYHHAHDAY | |
| | LNAVVGKALLGKYPQLEPEFVYGEYPKFNSHKFVRKSDKEENKATAKKFFYS | |
| | NIMNFFKKDIKLADGSIVERPVVERNDETGEIIWDKDKHISNVKKVLSYPQV | |
| | NIVKKVEEQTGGFSKESILPKGNSDKLIPRKTKWDTKKYGGFDSPIVAYSIL | |
| | VIADIEKGKSKKLKTVKELVGITIMEKMTFERDPVAFLERKGYRNIQEENII | |
| | KLPKYSLFELENGRKRLLASARELQKGNEIVLPNHLGTLLYHAKNIHKVDEK | |
| | EEEIPKHLEYVDKHRDEFKELLDVVSNFSKKYILAEGNLEKIKELYAQNNSE | |
| | SIEELASSFINLLTFTAIGAPAAFKFFDKNIDRKRYTSTTEILNATLIHQSI | |
| | TGLYETRIDLSKLGGD | |
| CasEnd-314 | MKKKYSIGLDIGTNSVGWAVITDEYKVPSKKFKVLGNTDRKSIKKNLLGALL | 274 |
| | FDSGETAEATRLKRTARRRYTRRKNRIRYLQEIFAEEMAKVDDSFFHRLEES | |
| | FLVEEDKKHERHPIFGNIVDEVAYHEKYPTIYHLRKKLADSTEKADLRLIYL | |
| | ALAHIIKFRGHFLIEGDLNSDNSDVQKLFIQLVQTYNQLFEENPINEEEVDA | |
| | KAILSAKLSKSRRLENLIAQFPNEKKNGLFGNLIALSLGLTPNFKSNFDLAE | |
| | DAKLQLSKDTYDEDLENLLAQIGDQYADLFLAAKNLSDAILLSDILTVNDES | |
| | TKAPLSASMIKRYDEHHQDLTLLKNLVRQQLPEKYKEIFFDKSKNGYAGYID | |
| | GGASQEEFYKYIKPILEKLDGTEEFLAKINREDFLRKQRTFDNGSIPHQIHL | |
| | NELHAILRRQEDFYPFLKENQEKIEKILTFRIPYYVGPLARGNSRFAWLTRK | |
| | SDETITPWNFEEVVDKGASAQAFIERMTNFDKNLPEEKVLPKHSLLYEYFTV | |
| | YNELTKVKYITEGMRKPEFLSSEQKEAIVDLLFKKNRKVTVKQLKEDYFKKI | |
| | ECFDSVEISGVEDRFNASLGTYHDLLKIIKDKDFLDNEENEDILEDIILTLT | |
| | LFEDREMIEERLKKYAHLFDKKVLKQLKRRRYTGWGRLSRKLINGIRDKQSG | |
| | KTILDFLKSDGFANRNFMQLIHDDSLTFKEEIQKAQVSGQGDSLHEQIANLA | |
| | GSPAIKKGILQSLKIVDELVKVMGRHNPENIVIEMARENQTTQKGQKNSRER | |
| | MKRIEEGIKELGSQILKEHPVENTQLQNEKLYLYYLQNGRDMYVDQELDINR | |
| | LSDYDVDHIVPQSFLKDDSIDNKVLTRSDKARGKSDNVPSEEVVKKMKNYWR | |
| | QLLNAKLITQRKFDNLTKAERGGLSELDKAGFIKRQLVETRQITKHVAQILD | |
| | SRFNTERDENNKLIRDVKIITLKSKLVSDFRKDFGLYKVREINDYHHAHDAY | |
| | LNAVVGTALIKKYPKLESEFVYGDYKVYDVRKMIAKSEQEIGKATAKYFFYS | |
| | NIMNFFKSEVTLANGTIRKRPKIETNEETGEIVWDKEKDFATVKKVLSMPQV | |
| | NIVKKTEVQTGGFSKESILPKRNSDKLIARKKDWDTKKYGGFDSPTVAYSVL | |
| | VVAKVEKGKAKKLKTVKELVGITIMERSSFEKDPIAFLEAKGYQDIREELII | |
| | KLPKYSLFELENGRKRMLASAGELQKGNELALPNHYVTLLYHASHYEKLKGK | |
| | SEDIEHKREYVEQHRHEFDEIFEQISEFSERYILADKNLEKIKSLFDENTDK | |
| | DIRELAENFIHLFTFTALGAPAAFKFFDTTIDRKRYTSTTEILDATLIHQSI | |
| | TGLYETRIDLSKLGGD | |
| CasEnd-315 | MKKPYSIGLDIGTNSVGWAVITDEYKVPSKKFKVLGNTDRQSIKKNLLGALL | 275 |
| | FDSGETAEATRLKRTARRRYTRRKNRIRYLQEIFAEEMSKVDDSFFHRLEES | |
| | FLVEEDKDDERHPIFGNIVDEVAYHENYPTIYHLRKHLADSTEKADLRLIYL | |
| | ALAHIIKFRGHFLIEGDLNSENTDVQKLFIKLVQTYNQTFEENPLSEAEIDA | |
| | KAILTAKLSKSRRLENLLAKFPNEKRNGLFGNLLALSLGLTPNFKSNFELSE | |
| | DAKLQISKDTYDEDLENLLAQIGDQYADLFVAAKNLYDAILLSGILTVNDES | |
| | TKAPLSASMIKRYDEHHQDLTLLKKLVRKQLPEKYKEIFFDESKNGYAGYID | |
| | GGASQEEFYKYIKPILSKLDGSEYFLDKIEREDFLRKQRTFDNGSIPHQIHL | |
| | NELHAILRRQEDYYPFLKENREKIEKILTFRIPYYVGPLARGNSRFAWAKRK | |
| | SDETITPWNFEEVVDKEASAQAFIERMTNYDKNLPEEKVLPKHSLLYEKFTV | |
| | YNELTKVKYITEGMKKPEFFSAEQKKEIVDLLFKKNRKVTVKKLKEFLFKKV | |
| | ECFDSVELSGVEDAFNASLGTYHDLLKILKDKDFLDNEANEDILEDIVLTLT | |
| | LFEDREMIEQRLLKYADLFDKKVLKKLKRRRYTGWGRLSAKLINGIRDKQSG | |
| | KTILDYLIDDGFANRNFMQLIHDDSLSFKEEIKKAQVIGQTDSLHEVIANLA | |
| | GSPAIKKGILQSLKIVDELVKVMGRHKPENIVIEMARENQTTQKGQKNSRER | |
| | MKRIEEGIKELGSQILKEHPVENTQLQNEKLYLYYLQNGRDMYVDQELDINR | |
| | LSDYDVDHIVPQSFLKDDSIDNKVLTRSDKARGKSDNVPSEEVVKKMKNYWR | |
| | QLLNAKLITQRKFDNLTKAERGGLSELDKAGFIKRQLVETRQITKHVAQILD | |
| | SRFNTEFDENDKLIREVKIITLKSKLVSDFRKDFGFYKVREINDYHHAHDAY | |
| | LNAVVGTALIKKYPKLESEFVYGDYKVYNVRKLIGKSDKEIGKATAKYFFYS | |
| | NIMNFFKTEITLANGTIRKRPLIETNEETGEIVWDKEKDFATVKKVLSMPQV | |
| | NIVKKTEVQTGGFSKESILPKRDSDKLIARKKDWDTKKYGGFDSPTVAYSVL | |
| | VVADVEKGKAKKLKTVKELVGITIMERSSFEKDPIAFLEDKGYHNIRKDNMI | |
| | KLPKYSLFELENGRKRLLASAGELQKGNELALPQKYVTLLYLASHYEKGKGK | |
| | SEDKSNKLEFVKQHRHEFDEIFDQIEEFSKRYILADKNLEKILEAYKENEEF | |
| | SISELAENFIHLFTFTSLGAPAAFKFFGKDIDRKRYTSTTEILNATLIHQSI | |
| | TGLYETRIDLSKLGGD | |
| CasEnd-316 | MDKPYSIGLDIGTNSVGWAVITDEYKVPSKKFKVLGNTDRHSIKKNLLGALL | 276 |
| | FDSGETAEATRLKRTARRRYTRRKNRILYLQEIFAEEMSKVDDSFFHRLEES | |
| | FLVEEDKRHDRHPIFGNIVEEVAYHENYPTIYHLRKKLADSTEKADLRLVYL | |
| | ALAHIIKFRGHFLIEGDLNSENTDVQKLFEKLVQTYDQTFEESHLSEETVDA | |
| | KEILTDKVSKSRRLENLIKQFPNEKKNGLFGNLIALSLGLQPNFKTNEDLSE | |
| | DAKLQFSKDTYDEDLENLLGQIGDDYADLFAAAKNLYDAILLSGILTVDTEI | |
| | TKAPLSASMIKRYDEHHQDLTLLKKFIRQNLPEKYKEIFFDESKNGYAGYID | |
| | GGAKQEEFYKYIKNILNKIDGSEYFLAKINREDFLRKQRTFDNGSIPHQIHL | |
| | QELKAILRRQGDYYPFLKENREKIEKILTFRIPYYVGPLARGNSRFAWLKRK | |
| | SDETITPWNFEEVVDKEASAQAFIERMTNYDKNLPEEKVLPKHSLLYEKFTV | |
| | YNELTKVKYVTEGMRKPAFFDANQKQEIVDLLFKTNRKVTVKKLKEFLFKEF | |
| | EEFDIVEISGVEKSFNASLGTYHDLLKIIKDKDFLDNPENEEILEDIVLTLT | |
| | LFEDREMIEERLSKYAHLFDKKVLKKLERRRYTGWGRLSAKLINGIRDKQSG | |
| | KTILDYLIDDGFANRNFMQLIHDDSLDFKEEIAKAQVIGETDSLHETIANLA | |
| | GSPAIKKGILQSLKIVDELVKVMGRHAPENIVIEMARENQTTQKGQRNSRER | |
| | LKRLEEAIKNLGSKILKEHPVENTQLQNDKLYLYYLQNGKDMYTGEELDIDR | |
| | LSDYDVDHIIPQSFIKDDSIDNRVLTSSAEARGKSDDVPSEEVVKKMKSFWH | |
| | KLLKSKLISQRKFDNLTKAERGGLSELDKAGFIKRQLVETRQITKHVAQILD | |
| | SRFNTKYDENDKLIRDVKIITLKSKLVSDFRKDFQLYKVREINDYHHAHDAY | |
| | LNAVVGTALIKKYPKLESEFVYGDYPVYNSYKMIAKSEQEIGKATAKYFFYS | |
| | NIMNFFKKDVTLANGEIRKRPLIETNEETGEIVWDKEKDFATVRKVMSMPQV | |
| | NIVKKTEVQTGGFSKESILPKRNSDKLIARKKDWDTKKYGGFDSPTVAYSVL | |
| | VVADIEKGKVKKLKTVKELVGITIMERSSFEKDPVAFLENKGYQNIQKENII | |
| | KLPKYSLFELENGRKRLLASAGELQKGNELALPNHYVTLLYHAKNYEKLKES | |
| | PEDNEKHLEYVEQHRDEFDELLDQISEFSERYILADKNLEKILELYSQNENS | |
| | DIEELASSFINLLTFTALGAPAAFKFFGKEIDRKRYTSTTEILNATLIHQSI | |
| | TGLYETRIDLSQLGGD | |
| CasEnd-317 | MDKKYSIGLDIGTNSVGWAVITDEYKVPSKKFKVLGNTDRHSIKKNLIGALL | 277 |
| | FDSGETAEATRLKRTARRRYTRRKNRIRYLQEIFSNEMAKVDDSFFHRLEES | |
| | FLVEEDKKHERHPIFGNIVDEVAYHEKYPTIYHLRKKLADSDEKADLRLIYL | |
| | ALAHMIKFRGHFLIEGDLNSDNSDVDKLFKQLVQTYNQLFEENPINEEGVDA | |
| | KAILSARLSKSRRLENLIAQFPGEKKNGLFGNLIALSLGLTPNFKSNEDLAE | |
| | DAKLQLSKDTYDEDLENLLAQIGDQYADLFLAAKNLSDAILLSDILTVNSEI | |
| | TKAPLSASMVKRYDEHHQDLTLLKALVRQQLPEKYKEIFFDQSKNGYAGYID | |
| | GGASQEEFYKYIKPILEKLDGTEELLDKIEREDFLRKQRTFDNGSIPHQIHL | |
| | GELHAILRRQEKYYPFLKENREKIEKILTFRIPYYVGPLARGNSRFAWMTRK | |
| | SDETITPWNFEEVVDKGASAQSFIERMTNFDKNLPNEKVLPKHSLLYEKFTV | |
| | YNELTKVKYVTEGMRKPEFLSGEQKQEIVDLLFKKNRKVTVKQLKEYYFKKI | |
| | ECFDSVEISGVEDRFNASLGTYHDLLKIIKDKDFLDNEENEDILEDIVLTLT | |
| | LFEDREMIEERLKKYADLFDKKVLKQLKRRRYTGWGRLSRKLINGIRDKQSG | |
| | KTILDFLKSDGFANRNFMQLIHDDSLTFKEEIEKAQVSGQGDSLHEQIANLA | |
| | GSPAIKKGILQSLKIVDELVKVMGRHKPENIVIEMARENQTTQKGQKNSRER | |
| | MKRLEEAIKELGSNILKEHPVENTQLQNEKLYLYYLQNGKDMYTGEELDIDR | |
| | LSDYDVDHIVPQSFLKDDSIDNKVLTSSAKARGKSDNVPSEEVVKKMKNYWK | |
| | QLLDAKLITQRKFDNLTKAERGGLTELDKAGFIKRQLVETRQITKHVAQILD | |
| | SRFNTKYDENDKLIRDVKIITLKSKLVSDFRKDFQFYKVREINNYHHAHDAY | |
| | LNAVVGTALIKKYPKLESEFVYGDYKVYDVRKMIAKSEQEIGKATAKYFFYS | |
| | NIMNFFKTEITLANGEIRKRPLIETNGETGEIVWDKEKDFATVRKVLSMPQV | |
| | NIVKKTEVQTGGFSKESILPKRDSDKLIARKKDWDTKKYGGFDSPTVAYSVL | |
| | VVAKVEKGKAKKLKTVKELVGITIMERSSFEKNPIDFLEAKGYKEVQKDLII | |
| | KLPKYSLFELENGRKRMLASAGELQKGNELALPSKYVEFLYLASHYEKLKGS | |
| | PEDNEQKQLFVEQHKEYFDEIIEQISEFSKRYILADANLEKIKSLYEKNRDK | |
| | PIEEQAESFINLLTFTALGAPAAFKFFDTTIDRKRYTSTKEILNATLIHQSI | |
| | TGLYETRIDLSQLGGD | |
| CasEnd-318 | MKKKYSIGLDIGTNSVGWAVITDEYKVPSKKFKVLGNTDRQSIKKNLIGALL | 278 |
| | FDSGETAEATRLKRTARRRYTRRKNRIRYLQEIFAEEMSKVDDSFFHRLEES | |
| | FLVEEDKKNERHPIFGNIVDEVAYHEKYPTIYHLRKKLADSTEKADLRLIYL | |
| | ALAHIIKFRGHFLIEGDLNSENSDVQKLFKQLVQTYNQLFEENPLNESGVDA | |
| | KAILTAKLSKSRRLENLIAQFPGEKKNGLFGNLIALSLGLTPNFKSNFDLAE | |
| | DAKLQLSKDTYDDDLENLLAQIGDQYADLFLAAKNLSDAILLSDILTVNDES | |
| | TKAPLSASMIKRYDEHHQDLTLLKALVRQQLPEKYKEIFFDDSKNGYAGYID | |
| | GGASQEDFYKFIKPILEKMDGSEDFLAKLNREDFLRKQRTFDNGSIPHQIHL | |
| | DELHAILRRQEEFYPFLKENREKIEKILTFRIPYYVGPLARGNSRFAWMTRK | |
| | SEETITPWNFEEVVDKEASAQAFIERMTNFDKNLPNEKVLPKHSLLYEYFTV | |
| | YNELTKVKYVTEGMRKPEFLSGEQKEAIVDLLFKKNRKVTVKQLKEDYFKKI | |
| | ECFDSVEISGVEDRFNASLGTYHDLLKIIKDKDFLDNEENEDILEDIVLTLT | |
| | LFEDKEMIEKRLSKYAHLFDKKVLKQLKRRRYTGWGRLSRKLINGIKDKQSG | |
| | KTILDFLKSDGFANRNFMQLIHDDSLTFKEEITKAQVKGQGDSLHEQIANLA | |
| | GSPAIKKGILQSVKIVDELVKVMGRHKPENIVIEMARENQTTQKGQKNSRER | |
| | MKRIEEGIKELGSQILKEHPVENTQLQNEKLYLYYLQNGRDMYVDQELDINR | |
| | LSDYDVDHIVPQSFLKDDSIDNKVLTRSDKARGKSDNVPSEEVVKKMKNYWR | |
| | QLLNAKLITQRKFDNLTKAERGGLSELDKAGFIKRQLVETRQITKHVAQILD | |
| | SRENTEYDENNKLIREVKIITLKSKLVSDFRKDFQFYKVREINNYHHAHDAY | |
| | LNAVVGTALIKKYPKLESEFVYGDYKVYNVRKMIIKSEQEIGKATAKYFFYS | |
| | NIMNFFKSDITLANGEIRKRPLIETNEETGEIVWDKTKDFATVRKVLSMPQV | |
| | NIVKKTEVQTGGFSKESILPKRNSDKLIARKKDWDTKKYGGFDSPTVAYSVL | |
| | VVAKVEKGKSKKLKTVKELVGITIMERSSFEKDPVAFLETKGYKNIRKELII | |
| | KLPKYSLFELENGRKRLLASAGELQKGNELALPNKYVTLLYHAHHYEKLKGS | |
| | EEDKEKKLSFVEQHRDYFDEIFDQIIEFSKRYILADKNLEKIKELYSNKEVK | |
| | SISELAENFIHLLTFTSLGAPAAFKFFDTTIDRKRYTSTTEVLNATLIHQSI | |
| | TGLYETRIDLSQLGGD | |
| CasEnd-319 | MDKKYSIGLDIGTNSVGWAVITDEYKVPSKKFKVLGNTDRHSIKKNLIGALL | 279 |
| | FDSGETAEATRLKRTARRRYTRRKNRICYLQEIFSNEMAKVDESFFHRLEES | |
| | FLVEEDKRNERHPIFGNIVDEVAYHEKYPTIYHLRKKLVDSDEKADLRLIYL | |
| | ALAHMIKFRGHFLIEGDLNSDNSDVQKLFVQLVQTYNQLFEESPIEAEGVDA | |
| | KAILSEKLSKSRRLENLIAQLPGEKKNGLFGNLIALSLGLTPNFKSNFDLSE | |
| | DAKLQLSKDTYDDDLEELLGQIGDQYADLFLAAKNLSDAILLSGILRVNTES | |
| | TKAPLSASMIKRYDEHHQDLTLLKELVRKQLPEKYKEIFFDQSKNGYAGYID | |
| | GGASQEEFYKYIKKILEKMDGTEELLAKLEREDLLRKQRTFDNGSIPHQIHL | |
| | GELHAILRRQEEYYPFLKENREKIEKILTFRIPYYVGPLARGNSRFAWMSRK | |
| | SDETITPWNFDEVVDKGASAEKFIERMTNFDKNLPDEKVLPKHSLLYEYFTV | |
| | YNELTKVKYVTEGGRKPEFLDGEQKKEIVDLLFKKNRKVTVKQLKEYYFKEF | |
| | DCFDIVEISGVEDRFNASLGTYHDLLKIIKDKEFLDNEENEEILEDIVLTLT | |
| | LFEDREMIKERLEKYADLFDKKVMKQLKRRRYTGWGRLSKKLINGIRDKQSG | |
| | KTILDFLKEDGFTNRNFMQLIHDDNLTFKEEIDKAQVTGKGDSLHEHIANLA | |
| | GSPAIKKGILQTVKVVDELVKVMGRHKPENIVIEMARENQTTQKGQKNSRER | |
| | MKRIEEGIKELGSQILKEHPVENTQLQNEKLYLYYLQNGRDMYVDQELDINR | |
| | LSDYDVDHIVPQSFLKDDSIDNKVLTRSDKARGKSDNVPSEEVVKKMKNYWR | |
| | QLLNAKLITQRKFDNLTKAERGGLSELDKAGFIKRQLVETRQITKHVAQILD | |
| | SRMNTKYDENDKLIREVKVITLKSKLVSDFRKDFQFYKVREINNYHHAHDAY | |
| | LNAVVGTALIKKYPKLESEFVYGDYKVYDVRKMIAKSEQEIGKATAKYFFYS | |
| | NIMNFFKTEITLANGEIRKRPLIETNGETGEIVWDKGRDFATVRKVLSMPQV | |
| | NIVKKTEVQTGGFSKESILPKRNSDKLIARKKDWDPKKYGGFDSPTVAYSVL | |
| | VVAKVEKGKSKKLKSVKELLGITIMERSSFEKNPIDFLEAKGYKEVKKDLII | |
| | KLPKYSLFELENGRKRMLASAGELQKGNELALPSKYVNFLYLASHYEKLKGS | |
| | PEDNEQKQLFVEQHKHYLDEIIEQISEFSKRVILADANLDKVLSAYNKHRDK | |
| | PIREQAENIIHLFTLTNLGAPAAFKYFDTTIDRKRYTSTKEVLDATLIHQSI | |
| | TGLYETRIDLSQLGGD | |
| CasEnd-320 | MDKPYSIGLDIGTNSVGWAVVTDEYKVPSKKFKVLGNTDRKSIKKNLLGALL | 280 |
| | FDSGETAEATRLKRTARRRYTRRKNRILYLQEIFAEEMNKVDESFFHRLEES | |
| | FLVEEDKRGERHPIFGNIVEEVAYHEKYPTIYHLRKHLADSDEKADLRLVYL | |
| | ALAHIIKFRGHFLIEGDLDSENTDVQALFKELLEIYDRTFEESPLEEETVDA | |
| | ESILTEKISKSRRLENLLAEFPGEKKNGFFGNFLKLIVGLTPNFKSNFGLEE | |
| | DAKLQFSKDTYDEDLEELLGQIGDEYADLFVAAKNLYDAILLSGILTVKDNS | |
| | TKAPLSASMVKRYDEHHQDLTLLKQFIRKNLPEKYKEIFFDQSKNGYAGYID | |
| | GGASQEDFYKYLKKLLEKIDGSEYFLDKIEREDFLRKQRTFDNGSIPHQIHL | |
| | QELKAIIRRQGEYYPFLKENQEKIEKILTFRIPYYVGPLARGNSRFAWLSRK | |
| | SDETITPWNFDEVVDKEKSAEAFIERMTNFDKNLPDEKVLPKHSLLYEKFTV | |
| | YNELTKVKYVTEGGKKPNFFDANLKQEIFDNVFKKYRKVTKKQLLDFLKKEF | |
| | DEFRIVDISGVEDRFNASLGTYHDLLKILDGKDFLDDPENEEILEDIIKTLT | |
| | LFEDREMIKKRLEKYSDLFDKEQLKKLERRRYTGWGRLSAKLINGIRDKETG | |
| | KTILDYLIDDGNANRNFMQLIHDDSLSFKEEIAKAQVIGDSESLHEVIANLA | |
| | GSPAIKKGILQSLKIVDELVKVMGRYEPENIVVEMARENQTTQKGQKNSRER | |
| | MKRLEESIKELGSKILKEHPTENTKLQNDKLYLYYLQNGKDMYTGEPLDIDN | |
| | LSDYDVDHIVPQSFLKDDSIDNRVLVSSAKARGKSDDVPSEEIVKKMKPFWK | |
| | KLLEAKLITQRKYDNLTKAERGGLTELDKAGFIKRQLVETRQITKHVAQILD | |
| | ERFNTEVDENGKLIRDVKIVTLKSKLVSQFRKEFELYKVREINNYHHAHDAY | |
| | LNAVVGKALIKKYPKLESEFVYGDYPVYDVKKLIRKSSREIGKATAKMFFYS | |
| | NIMNFFKSDVKLADGDVRERPDIEVNEETGEIAWDKEKHIATVKKVLSMPQV | |
| | NIVKKTEVQTGGFSKESILPKRDSDKLIARKKDWDTKKYGGFDSPTVAYSVL | |
| | VVADIEKGKAKKLKTVKELVGITIMERSRFEKNPVAFLEDKGYKNIQKENII | |
| | KLPKYSLFELENGRKRLLASAGELQKGNELALPNHYVTLLYHAKHYEKLKGK | |
| | PEDIEESRNYVEEHRDEFDELLDQISEFSKRYILADANLEKIKKLYEKNEDA | |
| | SIEELASSFINLLTFTALGAPAAFKFFGKNIDRKRYTSTKEILNATLIHQSI | |
| | TGLYETRIDLSKLGED | |
| CasEnd-321 | MDKSYSIGLDIGTNSVGWAVITDEYKVPSKKFKVLGNTDRHSIKKNLLGALL | 281 |
| | FDSGETAEATRLKRTARRRYTRRKNRIRYLQEIFAEEMSKVDDSFFHRLEES | |
| | FLVEEDKRGERHPIFGNIVDEVAYHEEYPTIYHLRKYLADSTEKADLRLIYL | |
| | ALAHIIKFRGHFLIEGDLNPENTDVQKLFIQFVETYDNTFEESHLSEETVDA | |
| | KAILTDKLSKSRRLENLIKQFPGEKKNGLFGNLIALSLGLTPNFKINFELSE | |
| | DAKLQFSKDTYDEDLENLLAQIGDDYADLFVAAKNLYDAILLSGILTVNTEI | |
| | TKAPLSASMIKRYDEHHQDLTLLKAFVREQLPEKYKEIFFDESKNGYAGYID | |
| | GGASQEEFYKYIKPILEKLDGTEYFLDKIEREDFLRKQRTFDNGSIPHQIHL | |
| | QELHAILRRQEEFYPFLKENQEKIEKILTFRIPYYVGPLARGNSRFAWLSRK | |
| | SDETITPWNFEEVVDKEASAQAFIERMTNFDKNLPEEKVLPKHSLLYEKFTV | |
| | YNELTKVKYITEGMRKPAFLSANQKEEIVDELFKKNRKVTVKKLKEFLFKEI | |
| | ECFDIVEISGVEDRFNASLGTYHDLLKIIKDKDFLDNEENEDILEDIVLTLT | |
| | LFEDREMIEQRLEKYADLFDKKVLKKLKRRRYTGWGRLSAKLINGIRDKQSG | |
| | KTILDYLIDDGFANRNFMQLIHDDSLTFKEEIKKAQVIGQGDSLHETIANLA | |
| | GSPAIKKGILQSLKIVDELVKVMGRHNPENIVIEMARENQTTQKGQKNSRER | |
| | LKRLEESIKKLGSNILKEHPVENTQLQNDKLYLYYLQNGKDMYTGEELDIDR | |
| | LSDYDVDHIIPQSFIKDDSIDNRVLTSSAKARGKSDNVPSEEVVKKMKSFWR | |
| | QLLNAKLISQRKFDNLTKAERGGLSELDKAGFIKRQLVETRQITKHVAQILD | |
| | SRFNTKYDENDKLIRKVKIITLKSKLVSQFRKDFGFYKVREINDYHHAHDAY | |
| | LNAVVGKALIKKYPKLESEFVYGDYKVYDSRKMIAKSEQEIGKATAKYFFYS | |
| | NIMNFFKSEITLANGEIRKRPLIETNEETGEIVWDKEKDFATVKKVLSMPQV | |
| | NIVKKTEVQTGGFSKESILPKRDSDKLIARKKDWDTKKYGGFDSPTVAYSVL | |
| | VVADIEKGKAKKLKTVKELVGITIMERSSFEKNPIAFLEDKGYKNIQKDSII | |
| | KLPKYSLFELENGRKRLLASAGELQKGNELALPQHYVILLYHAKRYEKLKES | |
| | PEDNEKHLEYVEQHRSEFDEILDQISEFSERYILADKNLEKIEELYEKNEDK | |
| | DISELASSFINLLTFTALGAPAAFKFFGKTIDRKRYTSTTEILNATLIHQSI | |
| | TGLYETRIDLSQLGGD | |
| CasEnd-322 | MDKPYSIGLDIGTNSVGWAVVTDEYKVPSKKFKVLGNTDRHSIKKNLLGALL | 282 |
| | FDSGETAEATRLKRTARRRYTRRKNRILYLQEIFAEEMNKVDDSFFHRLEES | |
| | FLVEEDKRFERHPIFGNIVDEVAYHEKYPTIYHLRKHLADSDEKADLRLVYL | |
| | ALAHIIKFRGHFLIEGDLNSENTDVQKLFEDFVQVYDKTFEESHLSEETVDA | |
| | SSILTAKISKSRKLENLIKQFPTEKKNGLFGNLIALSLGLQPNFKTNEDLSE | |
| | DAKLQFSKDTYEEDLENLLGQIGDDYADLFVAAKNLYDAILLSGILTVDTEI | |
| | TKAPLSASMIKRYDEHHQDLTLLKKFIRKNLPEKYKEIFFDESKNGYAGYID | |
| | GGASQEEFYKYLKPLLSKIDGSEYFLDKIEREDFLRKQRTFDNGSIPHQIHL | |
| | QELHAILRRQGEYYPFLKENQEKIEKILTFRIPYYVGPLARGNSRFAWASRK | |
| | SDETITPWNFDEVVDKEKSAEAFIERMTNNDKNLPEEKVLPKHSLLYEKFTV | |
| | YNELTKVKYVTEGMRKPAFFDANQKQEIFDGLFKKNRKVTVKKLLNFLFKEF | |
| | EEFRIVDISGVEKKFNASLGTYHDLLKIIKDKDFLDNPENEDILEDIVLTLT | |
| | LFEDREMIKKRLSKYADLFDKKQLKKLERRRYTGWGRLSAKLINGIRDKQSG | |
| | KTILDYLIDDGFANRNFMQLIHDDSLSFKEEIKKAQVIGKLDSLHEVIANLA | |
| | GSPAIKKGILQSLKIVDELVKVMGRYNPENIVIEMARENQTTQKGQRNSRER | |
| | LKRLEESLKELGSDILKEHPVENTQLQNDKLYLYYLQNGKDMYTGEELDIDR | |
| | LSDYDVDHIIPQSFIKDDSIDNRVLTSSAKARGKSDDVPSIEVVKKMKSFWS | |
| | QLLSAKLISQRKFDNLTKAERGGLTELDKAGFIKRQLVETRQITKHVAQILD | |
| | SRFNTKYDENDKLIRKVKIITLKSKLVSQFRKEFELYKVREINDYHHAHDAY | |
| | LNAVVGKALIKKYPKLESEFVYGDYKVYNSYKMIAKSEQEIGKATAKYFFYS | |
| | NIMNFFKTDITLANGEIRKRPLIETNEETGEIVWNKEKDFATVRKVLSMPQV | |
| | NIVKKTEVQTGGFSKESILPKRDSDKLIARKKDWDTKKYGGFDSPTVAYSVL | |
| | VVADIEKGKSKKLKTVKELVGITIMERSAFEKNPVAFLEDKGYKNIQKDNII | |
| | KLPKYSLFELENGRKRLLASAGELQKGNELALPQKYVILLYHAHRYEKLKES | |
| | PEDNPKHLEYVENHKSEFDEILDQISEFSKRYILADKNLEKIEELYAKNNDA | |
| | SVEELASSFINLLTFTALGAPAAFKFFGKTIDRKRYTSTTEILNATLIHQSI | |
| | TGLYETRIDLSQLGGD | |
| CasEnd-323 | MKKKYSIGLDIGTNSVGWAVITDEYKVPSKKFKVLGNTDRHSIKKNLIGALL | 283 |
| | FDSGETAEATRLKRTARRRYTRRKNRIRYLQEIFAEEMSKVDDSFFHRLEES | |
| | FLVEEDKKHERHPIFGNIVDEVAYHEKYPTIYHLRKKLADSTEKADLRLIYL | |
| | ALAHMIKFRGHFLIEGQLNPDNSDVQELFIQLLQTYNQLFEENPLKESRVDA | |
| | KAILSAKLSKSRRLENLIAQFPGEKKNGLFGNLIALSLGLTPNFKSNFDLAE | |
| | DAKLQLSKDTYDEDLDNLLAQIGDQYADLFLAAKNLSDAILLSDILTVNSES | |
| | TKAPLSASMVKRYDEHHQDLTLLKALVRQQLPEKYKEIFFDDSKNGYAGYID | |
| | GGASQEEFYKFIKPILEKMDGTEELLAKINREDFLRKQRTFDNGSIPHQIHL | |
| | GELHAILRRQEEFYPFLKENQEKIEKILTFRIPYYVGPLARGNSRFAWMTRK | |
| | SEETITPWNFEEVVDKEASAQAFIERMTNFDKNLPNEKVLPKHSLLYEYFTV | |
| | YNELTKVKYVTEGMGKPEFFSGNQKEEIVDLLFKKNRKVTVKQLKEDYFKKI | |
| | ECFDGVEISGVEDRFNASLGTYHDLLKIIKDKDFLDNEENEDILEDIVLTLT | |
| | LFEDREMIEERLEKYAHLFDKKVLKQLKRRRYTGWGRLSRKLINGIRDKQSG | |
| | KTILDFLKSDGFANRNFMQLIHDDSLTFKEEIQKAQVIGQGESLHEQIADLA | |
| | GSPAIKKGILQSVKIVDELVKVMGRHKPENIVIEMARENQTTQKGQKNSRER | |
| | MKRIEEGIKELGSQILKEHPVENTQLQNEKLYLYYLQNGRDMYVDQELDINR | |
| | LSDYDVDHIVPQSFLKDDSIDNKVLTRSDKARGKSDNVPSEEVVKKMKNYWR | |
| | QLLNAKLITQRKFDNLTKAERGGLSELDKAGFIKRQLVETRQITKHVAQILD | |
| | SRFNTKRDENDKLIREVKIITLKSKLVSDFRKDFQFYKVREINNYHHAHDAY | |
| | LNAVVGTALIKKYPKLESEFVYGDYKVYDVRKMIAKSEQEIGKATAKYFFYS | |
| | NIMNFFKSEITLANGEIRKRPLIETNEETGEIAWDKGKDFATVRKVLSMPQV | |
| | NIVKKTEVQTGGFSKESILPKRNSDKLIARKKDWDTKKYGGFDSPTVAYSVL | |
| | VVAKVEKGKVKKLKSVKELVGITIMERSSFEKNPIAFLEDKGYKEIKKDLII | |
| | KLPKYSLFELENGRKRMLASAGELQKGNELALPSHYVTLLYHASNYEKLKGK | |
| | SEDIEKKLEYVEQHRHEFDEIFEQIIEFSKRVILADANLSKVKSLFNENRDK | |
| | SIEELAENFIHLLTLTSLGAPAAFKFFDKTIDRKRYTSTTEVLNATLIHQSI | |
| | TGLYETRIDLSQLGGD | |
| CasEnd-324 | MKKPYSIGLDIGTNSVGWAVVTDDYKVPSKKMKVLGNTDRSSIKKNLLGALL | 284 |
| | FDSGETAEATRLKRTARRRYTRRKNRILYLQEIFAEEMNKVDESFFHRLEDS | |
| | FLVEEDKRGERHPIFGTIVEEVKYHEEFPTIYHLRKHLADSKEKADLRLVYL | |
| | ALAHIIKFRGHFLIEGKLDTENTDVQELFKEFLEVYDNTFERSALSEETVQV | |
| | EEILTDKISKSAKKERVLKLFPNEKSNGRFAEFLKLIVGNQADFKKHFELEE | |
| | KAKLQFSKDTYEEDLEGLLGQIGDEYADLFVSAKKLYDSILLSGILTVTDNS | |
| | TKAPLSASMVQRYEEHHEDLTKLKKFIRKKLSEKYKEVFFDKSKNGYAGYID | |
| | GGTKQEDFYKYLKKLLNKIEGSEYFLDKIEREDFLRKQRTFDNGSIPHQIHL | |
| | QEMRAIIRRQAEYYPFLAENQDKIEKILTFRIPYYVGPLARGNSRFAWASRK | |
| | SDETITPWNFDEIIDKEKSAEAFINRMTNYDLYLPDEKVLPKHSLLYEKFTV | |
| | YNELTKVKYITEQMGKTEFFDANMKQEIFDGVFKKYRKVTKDKLLNFLEKEF | |
| | DEFRIVDLSGVEKAFNASLGTYHDLKKILNDKDFLDDSENEKILEDIILTLT | |
| | LFEDREMIRKRLSKYSDLFTKEQLKKLERRHYTGWGRLSAKLINGIRDKETR | |
| | KTILDYLIDDGNSNRNFMQLIHDDALSFKEEIAKAQVIGETDSLHQVVADLA | |
| | GSPAIKKGILQSLKIVDELVKVMGRHNPENIVVEMARENQTTNKGQRNSRER | |
| | LKGLTDSIKELGSDILKEHPVDNSQLQNDRLYLYYLQNGKDMYTGEELDIDN | |
| | LSQYDVDHIIPQSFIKDDSIDNRVLVSSAKARGKSDDVPSIEVVRKMKSFWS | |
| | KLLSAKLISQRKFDNLTKAERGGLTDDDKAGFIKRQLVETRQITKHVAQILD | |
| | ERFNTETDENNKLIRKVKIVTLKSKLVSQFRKEFELYKVREINDYHHAHDAY | |
| | LNAVVGKALIGKYPQLEPEFVYGDYPKFNSFKLVRKSAKEEGKATAKKFFYS | |
| | NIMNFFKKDVKLADGTVIERPQVEVNDETGEIVWDKNKHISIVKKVLSMPQV | |
| | NIVKKTEVQTGGFSKESILPKRNSDKLIARKKKWDTKKYGGFDSPIVAYSVL | |
| | VIADIEKGKSKKLKTVKELVGITIMERSTFEKNPVAFLENKGYQNIQEENII | |
| | KLPKYSLFELEDGRKRLLASAGELQKGNELALPNHLVTLLYHAKNIEKIDEK | |
| | EEEEPEHLNYVQKHRDEFKELLDQVSEFSKRYILADKNLEKIEELYAQNNSA | |
| | DIEELASSFINLLTFTAIGAPADFKFFGKNIDRKRYTSTTEILNATLIHQSI | |
| | TGLYETRIDLSKLGED | |
| CasEnd-325 | MDKKYSIGLDIGTNSVGWAVITDEYKVPSKKFKVLGNTDRTSIKKNLLGALL | 28.5 |
| | FDSGETAEATRLKRTARRRYTRRKNRIRYLQEIFAEEMAKVDDSFFHRLEES | |
| | FLVENDKKGERHPIFGNIVDEVAYHEKYPTIYHLRKKLADSTEKADLRLIYL | |
| | ALAHMIKFRGHFLIEGDLNPENSDVQKLFIQLVQTYNQLFEESPIEEITVDA | |
| | KAILSARLSKSRRLENLIAQFPGQKKNGLFGNLIALSLGLTPNFKSNEDLSE | |
| | DAKLQLSKDTYDEDLDNLLAQIGDQYADLFLAAKNLSDAILLSDILTVNSEI | |
| | TKAPLSASMVKRYDEHHQDLTLLKALVRQQLPEKYKEIFFDDSKNGYAGYID | |
| | GGASQEEFYKYIKPILEKMDGTEELLAKLNREDFLRKQRTFDNGSIPHQIHL | |
| | GELHAILRRQEEFYPFLKENREKIEKILTFRIPYYVGPLARGNSRFAWMTRK | |
| | SEETITPWNFEEVVDKEASAQAFIERMTNFDKNLPEEKVLPKHSLLYEYFTV | |
| | YNELTKVKYVTEGMRKPEFLSGEQKEEIVDLLFKTNRKVTVKQLKEDYFKKI | |
| | ECFDSVEISGVEDRFNASLGTYHDLLKIIKDKDELDNEENEDILEDIVLTLT | |
| | LFEDREMIEQRLEKYAHLFDKKVLKQLKRRRYTGWGRLSRKLINGIRDKQSG | |
| | KTILDFLKSDGFANRNFMQLIHDDSLTFKEEIKKAQVIGQGDSLHEQIANLA | |
| | GSPAIKKGILQTLKIVDELVKVMGRHAPENIVIEMARENQTTQKGQKNSRER | |
| | MKRIEEGIKELGSQILKEHPVENTQLQNEKLYLYYLQNGRDMYVDQELDINR | |
| | LSDYDVDHIVPQSFLKDDSIDNKVLTRSDKARGKSDNVPSEEVVKKMKNYWR | |
| | QLLNAKLITQRKFDNLTKAERGGLSELDKAGFIKRQLVETRQITKHVAQILD | |
| | SRFNTERDENDKLIRDVKIITLKSKLVSDFRKDFQFYKVREINNYHHAHDAY | |
| | LNAVVGTALIKKYPKLESEFVYGDYKVYDVRKLIAKSEQEIGKATAKYFFYS | |
| | NIMNFFKTEITLANGEIIKRPLIETNEETGEIVWNKQKDFATVRKVLSMPQV | |
| | NIVKKTEVQTGGFSKESILPKRNSDKLIARKKDWDTKKYGGFDSPTVAYSVL | |
| | VIAKIEKGKSKKLKTVKELVGITIMERSSFEKDPIGFLEKKGYKDIQKDLII | |
| | KLPKYSLFELENGRKRLLASAGELQKGNELALPSKYVTFLYLASNYEKLKGS | |
| | PEDNEQKRPYVEQHMDEFKEILDQISEFSKRYILADKNLDKIISLYNQNNDS | |
| | DIEELAENFIHLFTFTSLGAPAAFKFFDKTIDRKRYTSTTEVLNATLIHQSI | |
| | TGLYETRIDLSQLGGD | |
| CasEnd-326 | MDKKYSIGLDIGTNSVGWAVITDEYKVPSKKFKVLGNTDRHSIKKNLIGALL | 286 |
| | FDSGETAEATRLKRTARRRYTRRKNRICYLQEIFSNEMAKVDDSFFHRLEES | |
| | FLVEEDKKHERHPIFGNIVDEVAYHEKYPTIYHLRKKLVDSTDKADLRLIYL | |
| | ALAHMIKFRGHFLIEGDLNPDNSDVQKLFKELIDAYNQTFEESPLDEESVDA | |
| | EAILTEKLSKSRRLENLLALFPGEKKNGLFGNILALSVGLTPNFKSNEDLAE | |
| | DAKLQFSKDTYDEDLEELLGQIGDEYADLFLAAKNVYDAILLSGILTVNTEI | |
| | TKAPLSASMIKRYDEHHQDLTLLKALVRQQLPEKYKEIFFDQSKNGYAGYID | |
| | GGASQEEFYKFIKPILEKMDGTEELLVKLNREDLLRKQRTFDNGSIPHQIHL | |
| | GELHAILRRQEDFYPFLKDNREKIEKILTFRIPYYVGPLARGNSRFAWMTRK | |
| | SEETITPWNFEEVVDKGASAQSFIERMTNFDKNLPNEKVLPKHSLLYEYFTV | |
| | YNELTKVKYVTEGMRKPAFLSGEQKKAIVDLLFKTNRKVTVKQLKEDYFKKI | |
| | ECFDSVEISGVEDRFNASLGTYHDLLKIIKDKDFLDNEENEDILEDIVLTLT | |
| | LFEDREMIEERLKTYAHLFDDKVMKQLKRRRYTGWGRLSRKLINGIRDKQSG | |
| | KTILDFLKSDGFANRNFMQLIHDDSLTFKEDIQKAQVSGQGDSLHEHIANLA | |
| | GSPAIKKGILQTVKVVDELVKVMGRHKPENIVIEMARENQTTQKGQKNSRER | |
| | MKRLLEAIKEFKSEILKEHPVENTKLQNDKLYLYYLQNGKDMYTGEPLDIDR | |
| | LSDYDVDHIVPQSFLKDDSIDNRVLVSSEEARGKSDDVPSEAVVRKMKSYWK | |
| | KLLDAKLITQRKFDNLTKAERGGLSELDKAGFIKRQLVETRQITKHVAQILD | |
| | SRMNTKYDENDKLIREVKVITLKSKLVSDFRKDFQFYKVREINNYHHAHDAY | |
| | LNAVVGTALIKKYPKLESEFVYGDYKVYDVRKMIAKSEQEIGKATAKYFFYS | |
| | NIMNFFKTEITLANGEIRKRPLIETNGETGEIVWDKGRDFATVRKVLSMPQV | |
| | NIVKKTEVQTGGFSKESILPKRNSDKLIARKKDWDPKKYGGFDSPTVAYSVL | |
| | VVAKVEKGKSKKLKSVKELLGITIMERSSFEKNPIDFLEAKGYKEVKKDLII | |
| | KLPKYSLFELENGRKRMLASAGELQKGNELALPSKYVNFLYLASHYEKLKGS | |
| | PEDNEQKQLFVEQHKHYLDEIIEQISEFSKRVILADANLDKVLSAYNKHRDK | |
| | PIREQAENIIHLFTLTNLGAPAAFKYFDTTIDRKRYTSTKEVLDATLIHQSI | |
| | TGLYETRIDLSQLGGD | |
| CasEnd-327 | MKKPYSIGLDIGTNSVGWAVVTDEYKVPSKKFKVLGNTDRQSIKKNLLGALL | 287 |
| | FDSGETAEATRLKRTARRRYTRRKNRILYLQEIFAEEMNKVDDSFFHRLEES | |
| | FLVEEDKRGERHPIFGNIVEEVAYHEKYPTIYHLRKHLADSTEKADLRLVYL | |
| | ALAHIIKFRGHFLIEGDLNAENTDVQKLFKKFVEVYDNTFEESHLSEETVDA | |
| | EAILTEKISKSRRLENLIAQFPNEKKNGLFGNLLALSLGLQPNFKTNFGLSE | |
| | DAKLQFSKDTYDEDLENLLGQIGDEYADLFVAAKNLYDAILLSGILTVNDSS | |
| | TKAPLSASMIKRYDEHHQDLTLLKKFIRENLPEKYKEIFFDESKNGYAGYID | |
| | GGASQEEFYKYLKKILSKVDGSEYFLEKIEREDFLRKQRTFDNGSIPHQIHL | |
| | QELHAILRRQEEYYPFLKENQEKIEKILTFRIPYYVGPLARGNSRFAWASRK | |
| | SDETITPWNFDEVVDKEASAEAFIERMTNNDKNLPEEKVLPKHSLLYEKFTV | |
| | YNELTKVKYVTEGMGKAKFFDANLKQEIFDGLFKKYRKVTKKKLLEFLFKEF | |
| | DEFRIVEISGVEKAFNASLGTYHDLLKIIKDKEFLDNPENEDILEDIVLTLT | |
| | LFEDREMIKKRLQKYADLFDKKQLKKLERRRYTGWGRLSAKLINGIRDKQSG | |
| | KTILDYLIDDGFANRNFMQLIHDDNLSFKEEIAKAQVIGESDSLHEVIADLA | |
| | GSPAIKKGILQSLKIVDELVKVMGRYAPENIVVEMARENQTTQKGQRNSRER | |
| | LKRLEEAIKELGSKILKEHPVENTQLQNDKLYLYYLQNGKDMYTGEELDIDR | |
| | LSDYDVDHIIPQSFIKDDSIDNRVLTSSAKARGKSDDVPSIEVVKKMKSEWS | |
| | KLLSAKLISQRKFDNLTKAERGGLTELDKAGFIKRQLVETRQITKHVAQILD | |
| | ERFNTEFDENDKLIRDVKIITLKSKLVSNFRKEFELYKVREINDYHHAHDAY | |
| | LNAVVGKALIKKYPKLESEFVYGDYPVYNSYKMIAKSEKEIGKATAKMFFYS | |
| | NIMNFFKTEIKLADGTVVERPVIEVNEETGEIVWDKTKHIATVKKVLSMPQV | |
| | NIVKKTEVQTGGFSKESILPKRDSDKLIARKKDWDTKKYGGFDSPTVAYSVL | |
| | VVADIEKGKSKKLKTVKELVGITIMERSRFEKNPVAFLEDKGYQNIQEEKII | |
| | KLPKYSLFELENGRKRLLASAGELQKGNELALPNKYVTLLYHAKHYEKLKEK | |
| | PEDNEKHREYVEKHRDEFDEILDQISEFSKRYILADKNLEKIKELYSKNESA | |
| | SIEELASSFINLLTFTALGAPAAFKFFGKTIDRKRYTSTKEILNATLIHQSI | |
| | TGLYETRIDLSKLGGD | |
| CasEnd-328 | MDKKYSIGLDIGTNSVGWAVITDEYKVPSKKFKVLGNTDRKSIKKNLIGALL | 288 |
| | FDSGETAEATRLKRTARRRYTRRKNRIRYLQEIFAEEMAKVDDSFFHRLEES | |
| | FLVEEDKENERHPIFGNIVDEVAYHEKYPTIYHLRKKLADSDEKADLRLVYL | |
| | ALAHMIKFRGHFLIEGDLNSDNSDVQKLFEQLVQTYNQLFEESPINEEEVDA | |
| | KAILTAKLSKSRRLENLIALFPGEKKNGLFGNLIALSLGLTPNFKSNFDLAE | |
| | DAKLQLSKDTYDEDLENLLAQIGDQYADLFLAAKNLSDAILLSGILTVKDES | |
| | TKAPLSASMVKRYDEHHQDLTLLKKLVRQQLPEKYKEIFFDQSKNGYAGYID | |
| | GGASQEEFYKYLKKILEKMDGSEEFLDKINREDFLRKQRTFDNGSIPHQIHL | |
| | QELHAILRRQEKYYPFLKDNREKIEKILTFRIPYYVGPLARGNSRFAWMSRK | |
| | SDETITPWNFEEVVDKEASAQKFIERMTNFDKNLPNEKVLPKHSLLYEYFTV | |
| | YNELTKVKYVTEGMRKPEFFSGEQKQEIVDLLFKKNRKVTVKQLKEYLFKNI | |
| | ECFDSVEISGVEDRFNASLGTYHDLLKIIKDKDELDNEENEDILEDIVLTLT | |
| | LFEDREMIEERLKKYANLFDDKVIKQLKRRRYTGWGRLSKKLINGIRDKQSG | |
| | KTILDYLKSDGFANRNFMQLIHDDSLTFKEEIEKAQVSGQGDSLHELIANLA | |
| | GSPAIKKGILQTIKIVDELVKVMGRHAPENIVIEMARENQTTQKGQKNSRER | |
| | MKRLEEAIKELGSQILKEHPVENTQLQNEKLYLYYLQNGKDMYTGEELDIDR | |
| | LSDYDVDHIVPQSFLKDDSIDNKVLVSSKKARGKSDNVPSEEVVKKMKNYWK | |
| | KLLDAKLITQRKFDNLTKAERGGLTELDKAGFIKRQLVETRQITKHVAQILD | |
| | SRFNTKYDENDKLIRDVKIITLKSKLVSQFRKDFQFYKVREINNYHHAHDAY | |
| | LNAVVGTALIKKYPKLESEFVYGDYKVYDVRKMIAKSEREIGKATAKMFFYS | |
| | NIMNFFKSEVTLANGEIRKRPLIEVNEETGEIVWDKEKDFATVRKVLSMPQV | |
| | NIVKKTEVQTGGFSKESILPKRNSDKLIARKKDWDPKKYGGFDSPTVAYSVL | |
| | VVAKVEKGKTKKLKTVKELVGITIMERSSFEKNPIAFLEAKGYKEVQEDLII | |
| | KLPKYSLFELENGRKRMLASAGELQKGNELALPSKYVTLLYLASHYEKLKGS | |
| | PEDNEEKQNYVEQHKEYFDEIIEQISEFSKRYILADANLEKIKSLYNKKRDK | |
| | SIEEQAESFINLLTFTNLGAPAAFKFFDTTIDRKRYTSTKEVLNATLIHQSI | |
| | TGLYETRIDLSKLGGD | |
| CasEnd-329 | MDKKYSIGLDIGTNSVGWAVITDEYKVPSKKFKVLGNTDRHSIKKNLIGALL | 289 |
| | FDSGETAEATRLKRTARRRYTRRKNRIRYLQEIFSEEMSKVDDSFFHRLEES | |
| | FLVEEDKKHERHPIFGNIVDEVAYHEKYPTIYHLRKKLADSTDKADLRLIYL | |
| | ALAHMIKFRGHFLIEGDLNPDNSDVDKLFIQLVQTYNQLFEENPINEEGVDA | |
| | KAILSAKLSKSRRLENLIAQLPGEKKNGLFGNLIALSLGLTPNFKSNFDLAE | |
| | DAKLQLSKDTYDEDLDNLLAQIGDQYADLFLAAKNLSDAILLSDILTVNSEI | |
| | TKAPLSASMIKRYDEHHQDLTLLKALVRQQLPEKYKEIFFDPSKNGYAGYID | |
| | GGASQEEFYKFIKPILEKMDGAEELLAKLEREDFLRKQRTFDNGSIPHQIHL | |
| | GELHAILRRQEDFYPFLKENREKIEKILTFRIPYYVGPLARGNSRFAWMTRK | |
| | SEETITPWNFEEVVDKGASAQSFIERMTNFDKNLPNEKVLPKHSLLYEYFTV | |
| | YNELTKVKYVTEGMRKPEFLSGEQKEAIVDLLFKKNRKVTVKQLKEDYFKKI | |
| | ECFDSVEISGVEDRFNASLGTYHDLLKIIKDKDFLDNEENEDILEDIVLTLT | |
| | LFEDREMIEERLKKYAHLFDDKVLKQLKRRRYTGWGRLSRKLINGIRDKQSG | |
| | KTILDFLKSDGFANRNFMQLIHDDSLTFKEEIQKAQVSGQGDSLHETIANLA | |
| | GSPAIKKGILQTIKIVDELVKVMGRHKPENIVIEMARENQTTQKGQKNSRER | |
| | MKRIEEGIKELGSQILKEHPVENTQLQNEKLYLYYLQNGRDMYVDQELDINR | |
| | LSDYDVDHIVPQSFLKDDSIDNKVLTRSDKARGKSDNVPSEEVVKKMKNYWR | |
| | QLLNAKLITQRKFDNLTKAERGGLSELDKAGFIKRQLVETRQITKHVAQILD | |
| | SRMNTEYDENDKLIREVKIITLKSKLVSDFRKDFQFYKVREINDYHHAHDAY | |
| | LNAVVGTALIKKYPKLESEFVYGDYKVYDVRKMIAKSEQEIGKATAKYFFYS | |
| | NIMNFFKTEITLANGEIRKRPLIETNEETGEIVWDKGKDFATVRKVLSMPQV | |
| | NIVKKTEVQTGGFSKESILPKRNSDKLIARKKDWDTKKYGGFDSPTVAYSVL | |
| | VVAKVEKGKSKKLKSVKELVGITIMERSSFEKDPISFLEDKGYKNVQKDLII | |
| | KLPKYSLFELENGRKRMLASAGELQKGNELALPQKYVNFLYLASHYEKLKGK | |
| | PEDNEQKLLYVEQHKHYFDEIFDQISEFSERYILADANLEKILELYNKHRDK | |
| | PISELAENFIHLFTFTSLGAPAAFKFFDTTIDRKRYTSTTEVLDATLIHQSI | |
| | TGLYETRIDLSQLGGD | |
| CasEnd-330 | MDKKYSIGLDIGTNSVGWAVITDEYKVPSKKFKVLGNTDRQSIKKNLIGALL | 290 |
| | FDSGETAEATRLKRTARRRYTRRKNRICYLQEIFSEEMSKVDDSFFHRLEES | |
| | FLVEEDKKHERHPIFGNIVDEVAYHEKYPTIYHLRKKLVDSTDKADLRLIYL | |
| | ALAHMIKFRGHFLIEGDLNPDNSDVDKLFIQLVQTYNQLFEENPINAEGVDA | |
| | KAILSARLSKSRRLENLIAQLPGEKKNGLFGNLIALSLGLTPNFKSNEDLSE | |
| | DAKLQLSKDTYDEDLDNLLAQIGDQYADLFLAAKNLSDAILLSDILRVNTEI | |
| | TKAPLSASMIKRYDEHHQDLTLLKALVRQQLPEKYKEIFFDKSKNGYAGYID | |
| | GGASQEEFYKFIKPILEKMDGTEELLVKLNREDLLRKQRTFDNGSIPHQIHL | |
| | GELHAILRRQEDFYPFLKDNREKIEKILTFRIPYYVGPLARGNSRFAWMTRK | |
| | SDETITPWNFEEVVDKGASAQSFIERMTNFDKNLPNEKVLPKHSLLYEYFTV | |
| | YNELTKVKYVTEGMRKPAFLSGEQKKEIVDLLFKTNRKVTVKQLKEDLFKEI | |
| | ECFDSVEISGVEDRFNASLGTYHDLLKIIKDKDFLDNEENEDILEDIVLTLT | |
| | LFEDREMIEERLKTYANLFDKKVMKQLKRRRYTGWGRLSRKLINGIRDKQSG | |
| | KTILDFLKSDGFANRNFMQLIHDDSLTFKEDIQKAQVSGQGDSLHEQIANLA | |
| | GSPAIKKGILQTVKVVDELVKVMGRHKPENIVIEMARENQTTQKGQKNSRER | |
| | MKRIEEGIKELGSQILKEHPVENTQLQNEKLYLYYLQNGRDMYTDQELDINR | |
| | LSDYDVDHIVPQSFLKDDSIDNKVLTSSKKARGKSDDVPSEEVVKKMKSYWR | |
| | QLLNAKLITQRKFDNLTKAERGGLSELDKAGFIKRQLVETRQITKHVAQILD | |
| | SRMNTKYDENDKLIRDVKVITLKSKLVSDFRKDFQFYKVREINNYHHAHDAY | |
| | LNAVVGTALIKKYPKLESEFVYGDYKVYDSRKMIAKSEQEIGKATAKYFFYS | |
| | NIMNFFKSEIKLANGEIRKRPLIETNEETGEIVWDKGRDFATVRKVLSMPQV | |
| | NIVKKTEVQTGGFSKESILPKRNSDKLIARKKDWDPKKYGGFDSPTVAYSVL | |
| | VVAKVEKGKAKKLKSVKELLGITIMERSSFEKNPVDFLEAKGYKNIQKDLII | |
| | KLPKYSLFELENGRKRLLASAGELQKGNELALPQKYVTFLYLASHYEKLKGK | |
| | PEDEEKKQLFVEQHRHYFDEILEQISEFSERYILADKNLEKILELYSEHEDY | |
| | SIREQAENIINLFTFTNLGAPAAFKYFDTTIDRKRYTSTTEILNATLIHQSI | |
| | TGLYETRIDLSQLGGD | |
| CasEnd-331 | MKKPYSIGLDIGTNSVGWAVVTDEYKVPSKKFKVLGNTDRQSIKKNLLGALL | 291 |
| | FDSGETAEATRLKRTARRRYTRRKNRILYLQEIFAEEMNKVDESFFHRLEES | |
| | FLVEEDKRGERHPIFGNIVDEVAYHEKYPTIYHLRKHLADSTEKADLRLVYL | |
| | ALAHIIKFRGHFLIEGDLNTENTDVQKLFKQFLEVYDKTFEESHLSEETVDA | |
| | EAILTEKVSKSRRLENLIAQFPNEKKNGFFGNLIALSLGLQPNFKINFELSE | |
| | DAKLQFSKDTYDEDLENLLGQIGDEYADLFVAAKNLYDAILLSGILTVNDES | |
| | TKAPLSASMIKRYDEHHQDLTLLKAFIRKNLPEKYKEIFFDKSKNGYAGYID | |
| | GGASQEEFYKYIKKLLSKIDGSEYFLEKIEREDFLRKQRTFDNGSIPHQIHL | |
| | QELKAILRRQGEYYPFLKENQEKIEKILTFRIPYYVGPLARGNSRFAWASRK | |
| | SDETITPWNFDEVVDKEASAEAFIERMTNNDKNLPNEKVLPKHSLLYEKFTV | |
| | YNELTKVKYVTEQMGKAEFFDANMKQEIFDGLFKKERKVTKKKLLDFLKKEF | |
| | DEFRIVDISGVEKAFNASLGTYHDLLKIIKDKDFLDNEENEDILEDIILTLT | |
| | LFEDREMIEKRLSKYADLFDKKVLKKLERRRYTGWGRLSAKLINGIRDKQTG | |
| | KTILDYLIDDGFANRNFMQLIHDDSLSFKEEIAKAQVIGEGDSLHEVIADLA | |
| | GSPAIKKGILQSLKIVDELVKVMGRYNPENIVVEMARENQTTQKGQRNSRER | |
| | LKRLEEAIKELGSKILKEHPVENTQLQNDKLYLYYLQNGKDMYTGEELDIDR | |
| | LSDYDVDHIIPQSFIKDDSIDNRVLTSSAKARGKSDDVPSEEVVKKMKSFWN | |
| | KLLNAKLISQRKFDNLTKAERGGLTELDKAGFIKRQLVETRQITKHVAQILD | |
| | ERFNTEFDENNKLIRDVKIVTLKSKLVSNFRKEFELYKVREINDYHHAHDAY | |
| | LNAVVGTALIKKYPKLESEFVYGDYPVYNSYKMVAKSEQEIGKATAKMFFYS | |
| | NIMNFFKTDIKLADGTIIERPVIEVNEETGEIVWDKDKHIATVKKVLSMPQV | |
| | NIVKKTEVQTGGFSKESILPKRDSDKLIARKKDWDTKKYGGFDSPTVAYSVL | |
| | VVADIEKGKSKKLKTVKELVGITIMERSRFEKNPVAFLEDKGYQNIQKDKII | |
| | KLPKYSLFELENGRKRLLASAGELQKGNELALPNKYVTLLYHAKHYEKLKEK | |
| | PEDNEKHKEYVEQHRDEFKEILDQISEFSKRYILADKNLEKIEELYSKNRNA | |
| | SIEELASSFINLLTFTALGAPAAFKFFGTTIDRKRYTSTTEILNATLIHQSI | |
| | TGLYETRIDLSKLGGD | |
| CasEnd-332 | MKKPYSIGLDIGTNSVGWAVITDEYKVPSKKFKVLGNTDRSSIKKNLLGALL | 292 |
| | FDSGETAEATRLKRTARRRYTRRKNRILYLQEIFAEEMNKVDDSFFHRLEES | |
| | FLVEEDKRGERHPIFGNIVEEVAYHEKYPTIYHLRKHLADSTEKADLRLVYL | |
| | ALAHIIKFRGHFLIEGDLNSENTDVQALFKQFLETYDSTFEESHLSEETVDA | |
| | EAILTDKVSKSRKLENLIAQFPNEKKNGFFGNLIALSLGLQPNFKTNFGLSE | |
| | DAKLQFSKDTYDEDLENLLGQIGDEYADLFVAAKNLYDAILLSGILTVNDES | |
| | TKAPLSASMIKRYDEHHQDLTLLKAFVRKQLPEKYKEIFFDKSKNGYAGYID | |
| | GGASQEEFYKYIKPLLSKVDGSEYFLEKIEREDFLRKQRTFDNGSIPHQIHL | |
| | QELKAILRRQGEFYPFLKENQEKIEKILTFRIPYYVGPLARGNSRFAWASRK | |
| | SDETITPWNFDEVVDKEASAEAFIERMTNNDKNLPEEKVLPKHSLLYEKFTV | |
| | YNELTKVKYVTEQMGKAEFFDANLKQEIFDGLFKKERKVTKKKLLEFLFKEF | |
| | DEFRIVDISGVEKAFNASLGTYHDLLKIIKDKEFLDNEENEDILEDIVLTLT | |
| | LFEDREMIKQRLSKYADLFDKKQLKKLERRRYTGWGRLSAKLINGIRDKQSG | |
| | KTILDYLIDDGFANRNFMQLIHDDSLSFKEEIAKAQVIGDSDSLHEVIADLA | |
| | GSPAIKKGILQSLKIVDELVKVMGRYNPENIVVEMARENQTTQKGQRNSRER | |
| | LKRLEEAIKELGSDILKEHPVENTQLQNDKLYLYYLQNGKDMYTGEELDIDR | |
| | LSDYDVDHIIPQSFIKDDSIDNRVLTSSAKARGKSDDVPSEEVVKKMKSFWK | |
| | KLLNAKLISQRKFDNLTKAERGGLTELDKAGFIKRQLVETRQITKHVAQILD | |
| | ERFNTEFDENNKLIRKVKIITLKSKLVSNFRKEFELYKVREINDYHHAHDAY | |
| | LNAVVGKALIKKYPKLESEFVYGDYPVYNSYKLIAKSEKEIGKATAKMFFYS | |
| | NIMNFFKTEIKLADGTVIERPQIEVNEETGEIVWDKTKHIATVRKVLSMPQV | |
| | NIVKKTEVQTGGFSKESILPKRNSDKLIARKKDWDTKKYGGFDSPTVAYSVL | |
| | VVADIEKGKKKKLKTVKELVGITIMERSRFEKNPVAFLEDKGYQNIQEENII | |
| | KLPKYSLFELENGRKRLLASAGELQKGNELALPNKYVTLLYHAKHYEKLKGK | |
| | PEDEEKHREYVEKHRSEFDEILDQISEFSKRYILADKNLEKIEELYDKNEDK | |
| | SIEELASSFINLFTFTALGAPAAFKFFGTNIDRKRYTSTKEILNATLIHQSI | |
| | TGLYETRIDLSKLGGD | |
| CasEnd-333 | MKKKYSIGLDIGTNSVGWAVITDEYKVPSKKFKVLGNTDRHSIKKNLIGALL | 293 |
| | FDSGETAEATRLKRTARRRYTRRKNRIRYLQEIFAEEMNKVDDSFFHRLEES | |
| | FLVEEDKKHERHPIFGNIVDEVAYHEKYPTIYHLRKHLVDSTEKADLRLIYL | |
| | ALAHMIKFRGHFLIEGDLNPENSDVQKLFIQLVQTYNNLFEEDPLNEEGVDA | |
| | EAILTAKLSKSRRLENLIAQFPGEKRNGLFGNLIALSLGLTPNFKSNFELSE | |
| | DAKLQLSKDTYDEDLEELLAQIGDQYADLFLAAKNLSDAILLSGILRVNDEI | |
| | TKAPLSASMIKRYDEHHQDLTLLKALVRAQLPEKYKEIFFDKTKNGYAGYID | |
| | GGASQEEFYKYIKPILEKMDGTEYLLAKLEREDLLRKQRTFDNGSIPHQIHL | |
| | GELHAILRRQEEFYPFLKENQEKIEKILTFRIPYYVGPLARGNSRFAWMKRK | |
| | SDETITPWNFEEVVDKGASAQAFIERMTNFDKNLPEEKVLPKHSLLYETFTV | |
| | YNELTKVKYVTEGMGKPEFLSAEQKKEIVDGLFKKNRKVTVKQLKEFYFKEF | |
| | DECRIVDISGVEDRFNASLGTYHDLLKIIKDKDFLDNVENEKILEDIVLTLT | |
| | LFEDREMIEKRLAKYANLFDKKVMKQLKRRRYTGWGRLSRKLINGIRDKQSG | |
| | KTILDFLKSDGFANRNFMQLIHDDSLTFKEEIDKAQVEGDGDSLHETIADLA | |
| | GSPAIKKGILQTVKVVDELVKVMGRHKPENIVIEMARENQTTQKGQKNSRER | |
| | LKRIEEGIKELGSDILKEHPVENTQLQNDKLYLYYLQNGRDMYTGEELDIDR | |
| | LSDYDVDHIVPQSFIKDDSIDNKVLTRSAEARGKSDDVPSIEVVRKMKSYWR | |
| | QLLKAGLITQRKFDNLTKAERGGLTELDKAGFIKRQLVETRQITKHVAQILD | |
| | SRMNTEHDENNKLIRDVKVITLKSKLVSDFRKDFQFYKVREINDYHHAHDAY | |
| | LNAVVGTALIKKYPKLESEFVYGDYKVYDSRKMIAKSEQEIGKATAKYFFYS | |
| | NIMNFFKTEITLANGEIRKRPLIETNGETGEIVWDKGRDFATVRKVLSMPQV | |
| | NIVKKTEVQTGGFSKESILPKRNSDKLIARKKDWDPKKYGGFDSPTVAYSVL | |
| | VVAKVEKGKSKKLKSVKELLGITIMERSSFEKNPIDFLEAKGYKEVKKDLII | |
| | KLPKYSLFELENGRKRMLASAGELQKGNELALPSKYVNFLYLASHYEKLKGS | |
| | PEDNEQKQLFVEQHKHYLDEIIEQISEFSKRVILADANLDKVLSAYNKHRDK | |
| | PIREQAENIIHLFTLTNLGAPAAFKYFDTTIDRKRYTSTKEVLDATLIHQSI | |
| | TGLYETRIDLSQLGGD | |
| CasEnd-334 | MKKPYSIGLDIGTNSVGWAVVTDDYKVPSKKMKVLGNTDRQSIKKNLLGALL | 294 |
| | FDSGETAEATRLKRTARRRYTRRKNRILYLQEIFAEEMNKVDDSFFHRLEDS | |
| | FLVEEDKRGERHPIFGNIVEEVAYHEKFPTIYHLRKHLADSTEKADLRLVYL | |
| | ALAHIIKFRGHFLIEGDLDTENTDVQKLFKQFVEVYDQTFEESHLSEETVDA | |
| | ESILTDKLSKSRRLENLLKLFPNEKKNGLFGNLIALSLGLQPNFKINFELSE | |
| | DAKLQFSKDTYDEDLENLLGQIGDEYADVFVAAKNLYDAILLSGILTVNDES | |
| | TKAPLSASMIKRYEEHHEDLTLLKKFIRKNLPEKYKEIFFDESKNGYAGYID | |
| | GGTSQEEFYKYIKKLLEKIDGSEYFLDKIEREDFLRKQRTFDNGSIPHQIHL | |
| | QELKAILRRQGEYYPFLKENQEKIEKILTFRIPYYVGPLARGNSRFAWASRK | |
| | SDETITPWNFDEVVDKEASAEAFIERMTNNDLYLPEEKVLPKHSLLYEKFTV | |
| | YNELTKVKYVTEGMGKAKFFDANMKQEIFDGLFKKNRKVTKKKLLEFLDKEF | |
| | DEFRIVDISGVEKAFNASLGTYHDLLKIIKDKEFLDNEENEDILEDIVLTLT | |
| | LFEDREMIKKRLEKYADLFDKKQLKKLERRHYTGWGRLSAKLINGIRDKQSG | |
| | KTILDYLIDDGFSNRNFMQLIHDDNLSFKEEIAKAQVIGDTDSLHEVVAELA | |
| | GSPAIKKGILQSLKIVDELVKVMGRHAPENIVVEMARENQTTAKGQRNSRER | |
| | LKRLEEAIKELGSQILKEHPVENQQLQNDRLYLYYLQNGKDMYTGEELDIDR | |
| | LSQYDVDHIIPQSFIKDDSIDNRVLTSSDKARGKSDDVPSEEVVKKMKSFWL | |
| | KLLKAKLISQRKFDNLTKAERGGLTEDDKAGFIKRQLVETRQITKHVAQILD | |
| | ERFNTEFDENNKLIRDVKIITLKSKLVSNFRKEFELYKVREINDYHHAHDAY | |
| | LNAVVGKALIKKYPKLEPEFVYGDYPKYNSYKLVAKSDKERGKATAKMFFYS | |
| | NIMNFFKTDIKLADGTIVERPVIEVNEETGEIAWDKNKHIATVKKVLSMPQV | |
| | NIVKKTEVQTGGFSKESILPKRDSDKLIARKKKWDTKKYGGFDSPTVAYSVL | |
| | VVADIEKGKAKKLKTVKELVGITIMERSRFEKNPIAFLEDKGYQNIQEENII | |
| | KLPKYSLFELENGRKRLLASAGELQKGNELALPNKLVTLLYHAKHIEKLDEK | |
| | DEDVPKHLEYVEEHRDEFKEILDQISEFSKRYILADKNLEKIEELYAKNEDA | |
| | SIEELASSFINLLTFTALGAPAAFKFFGKNIDRKRYTSTTEILNATLIHQSI | |
| | TGLYETRIDLSKLGGD | |
| CasEnd-335 | MKKPYSIGLDIGTNSVGWAVITDDYKVPSKKMKVLGNTDRKSIKKNLLGALL | 295 |
| | FDSGETAEATRLKRTARRRYTRRKNRILYLQEIFAEEMNKVDDSFFHRLEES | |
| | FLVEEDKRGERHPIFGNIVEEVAYHEKFPTIYHLRKHLADSTEKADLRLVYL | |
| | ALAHMIKFRGHFLIEGDLNTENSDVQKLFKQFVQEYNSTFEESHLEEETVDA | |
| | EEILTEKLSKSRRLENLIAQFPNEKKNGLFGNLIALMLGLQPNFKTNEDLSE | |
| | DAKLQFSKDTYDEDLENLLGQIGDEYADVFVAAKNLYDAILLSGILTVNDSS | |
| | TKAPLSASMIKRYDEHHEDLTLLKAFIRKNLPEKYKEIFFDKSKNGYAGYID | |
| | GGTSQEEFYKYIKKILEKMDGSEYFLDKIEREDFLRKQRTFDNGSIPHQIHL | |
| | QELHAILRRQGKYYPFLKENQEKIEKILTFRIPYYVGPLARGNSRFAWASRK | |
| | SDETITPWNFDEVIDKEKSAEAFIERMTNNDLYLPEEKVLPKHSLLYEKFTV | |
| | YNELTKVKYVTEGMGEAEFFDANQKQEIFDHVFKKNRKVTVKKLKNFLFKEF | |
| | DEFRIVDISGVEDAFNASLGTYHDLLKIIGDKEFLDNEENEDILEDIVLTLT | |
| | LFEDREMIEKRLSKYADLFSKKVLKKLKRRHYTGWGRLSAKLINGIRDKQSG | |
| | KTILDYLIDDGFANRNFMQLIHDDSLTFKEEIAKAQVIGNSDSLHETVADLA | |
| | GSPAIKKGILQSLKIVDELVKVMGRYNPENIVVEMARENQTTAKGQRNSRER | |
| | LKRLEEAMKELGSDILKEYPVENQQLQNDRLYLYYLQNGKDMYTGEELDIDR | |
| | LSDYDVDHIIPQSFIKDDSIDNRVLVSSAKARGKSDDVPSEEVVKKMKPEWS | |
| | KLLKAKLISQRKFDNLTKAERGGLTEDDKAGFIKRQLVETRQITKHVAQILD | |
| | SRFNTERDENDKLIRKVKIITLKSKLVSNFRKDFQFYKVREINDYHHAHDAY | |
| | LNAVVGTALIKKYPKLEPEFVYGDYPKYNSYKLIKKSEKERGKATAKMFFYS | |
| | NIMNFFKTKVKLADGTVVERPIIEVNDETGEIVWDKEKDFATVRKVLSMPQV | |
| | NIVKKTEVQTGGFSKESILPKRDSDKLIARKKKWDPKKYGGFDSPTVAYSVL | |
| | VVADIEKGKTKKLKTVKELVGITIMERSSFEKNPIAFLEAKGYQNIQENNII | |
| | KLPKYSLFELENGRKRLLASAGELQKGNELALPVKYVTLLYHAKHIEKLDGK | |
| | PEDKEKHLEYVMEHNEEFDEIWDQISEFSKRYILADKNLEKIEELYTKNNDK | |
| | PIRELASSFINLLTFTALGAPADFKFFGETIDRKRYTSTKEILNATLIHQSI | |
| | TGLYETRIDLSKLGGD | |
| CasEnd-336 | MDKPYSIGLDIGTNSVGWAVITDEYKVPSKKFKVLGNTDRHSIKKNLLGALL | 296 |
| | FDSGETAEATRLKRTARRRYTRRKNRILYLQEIFAEEMAKVDDSFFHRLEES | |
| | FLVEDDKRGERHPIFGNIVEEVAYHEKYPTIYHLRKHLADSTEKADLRLVYL | |
| | ALAHIIKFRGHFLIEGDLNTENSDVQKLFEQLLQTYDQTFEESHLSEITVDA | |
| | KAILTAKISKSRRLENLIAQIPNEKKNGLFGNLVALSLGLQPNFKSNFDLSE | |
| | DAKLQFSKDTYDEDLENLLGQIGDDYADLFVAAKNLYDAILLSGILTVNTEI | |
| | TKAPLSASMIKRYDEHHQDLTLLKDFVRENLPEKYKEIFFDKTKNGYAGYID | |
| | GGASQEDFYKYIKPILEKLDGSEYFLDKIEREDFLRKQRTFDNGSIPHQIHL | |
| | QELHAILRRQEEFYPFLKENQEKIEKILTFRIPYYVGPLARGNSRFAWMTRK | |
| | SDETITPWNFEEVVDKEASAEAFIERMTNFDKNLPDEKVLPKHSLLYEKFTV | |
| | YNELTKVKYITEQMRKPAFFDSEQKKEIVDLTFKKNRKVTKKKLKEFLDKEF | |
| | EEFRIVEISGVEDAFNASLGTYHDLLKIIKDKEFLDNEENEDILEDIVLTLT | |
| | LFEDREMIEKRLSKYADLFDKKVLKKLERRRYTGWGRLSAKLINGIRDKQSG | |
| | KTILDYLIDDGFANRNFMQLIHDDSLSFKEEIQKAQVIGKGDSLHEVIAELA | |
| | GSPAIKKGILQSLKIVDELVKVMGRYNPENIVIEMARENQTTQKGQRNSRER | |
| | LKRLEESLKKLGSKILKEHPVENTQLQNDKLYLYYLQNGKDMYTGEELDIDR | |
| | LSDYDVDHIIPQSFIKDDSIDNRVLTSSAKARGKSDDVPSEEVVKKMKSFWQ | |
| | QLLKAKLISQRKFDNLTKAERGGLTELDKAGFIKRQLVETRQITKHVAQILD | |
| | ERFNTKYDENDKLIRKVKIITLKSKLVSQFRKDFGFYKVREINDYHHAHDAY | |
| | LNAVVGKALIKKYPKLESEFVYGDYKVYNSRKMIAKSEQEIGKATAKYFFYS | |
| | NIMNFFKTEITLANGEIRKRPLIETNEETGEIVWDKEKDFATVRKVLSMPQV | |
| | NIVKKTEVQTGGFSKESILPKRNSDKLIARKKDWDTKKYGGFDSPTVAYSVL | |
| | VIADIEKGKNKKLKTVKELVGITIMERSSFEKDPVAFLEGKGYKNIQKDTII | |
| | KLPKYSLFELENGRKRLLASAGELQKGNELALPNKYVTLLYHASRYEKLKES | |
| | PEDNEKHLEYVEQHRSEFDEILDQISEFSKRYKLADKNLEKIQELYKDHDLF | |
| | SVEELASSFINLLTFTALGAPAAFKFFGVTIDRKRYTSTTEILDATLIHQSI | |
| | TGLYETRIDLSQLGGD | |
| CasEnd-337 | MDKKYSIGLDIGTNSVGWAVITDEYKVPSKKFKVLGNTDRHSIKKNLIGALL | 297 |
| | FDSGETAEATRLKRTARRRYTRRKNRICYLQEIFSNEMAKVDDSFFHRLEES | |
| | FLVEEDKRGERHPIFGNIVDEVAYHEKYPTIYHLRKHLADSTEKADLRLVYL | |
| | ALAHIIKFRGHFLIEGDLNSENSDVQKLFKQFVQTYDQTFEESHLSEETVDA | |
| | ESILTEKVSKSRRLENLIAQFPNEKKNGLFGNLIALSLGLQPNFKTNFELSE | |
| | DAKLQFSKDTYDEDLENLLGQIGDEYADLFLAAKNLYDAILLSGILTVNDES | |
| | TKAPLSASMIKRYDEHHQDLTLLKAFVRKQLPEKYKEIFFDESKNGYAGYID | |
| | GGASQEEFYKYIKKILEKIDGSEYFLDKIEREDFLRKQRTFDNGSIPHQIHL | |
| | QELHAILRRQEEYYPFLKENQEKIEKILTFRIPYYVGPLARGNSRFAWASRK | |
| | SDETITPWNFEEVVDKEASAEAFIERMTNFDKNLPEEKVLPKHSLLYEKFTV | |
| | YNELTKVKYVTEGMGKAEFFDANMKQEIFDGLFKKNRKVTKKKLLDFLFKEF | |
| | DEFRIVDISGVEDAFNASLGTYHDLLKIIKDKDFLDNEENEDILEDIVLTLT | |
| | LFEDREMIRKRLSKYADLFDKKQLKKLERRRYTGWGRLSAKLINGIRDKQSG | |
| | KTILDYLIDDGFANRNFMQLIHDDSLSFKEEIQKAQVIGESDSLHEHIANLA | |
| | GSPAIKKGILQTVKVVDELVKVMGRHKPENIVIEMARENQTTQKGQRNSRER | |
| | LKRLEEAIKELGSQILKEHPVENTQLQNDKLYLYYLQNGKDMYTGEELDIDR | |
| | LSDYDVDHIIPQSFIKDDSIDNRVLTSSAKARGKSDDVPSEEVVKKMKSFWS | |
| | KLLKAKLISQRKFDNLTKAERGGLSELDKAGFIKRQLVETRQITKHVAQILD | |
| | SRMNTKYDENDKLIREVKVITLKSKLVSDFRKDFQFYKVREINNYHHAHDAY | |
| | LNAVVGTALIKKYPKLESEFVYGDYKVYDVRKMIAKSEQEIGKATAKYFFYS | |
| | NIMNFFKTEITLANGEIRKRPLIETNGETGEIVWDKGRDFATVRKVLSMPQV | |
| | NIVKKTEVQTGGFSKESILPKRDSDKLIARKKDWDTKKYGGFDSPTVAYSVL | |
| | VVADIEKGKAKKLKTVKELVGITIMERSAFEKNPVAFLEDKGYQNIQEDNII | |
| | KLPKYSLFELENGRKRLLASAGELQKGNELALPAKYVTLLYHAKHYEKLKEK | |
| | PEDEEKHLEYVEKHRDEFKEILDQISEFSKRYILADKNLEKIEELYSKNENL | |
| | SIEELASSFINLLTFTALGAPAAFKFFGTTIDRKRYTSTKEILNATLIHQSI | |
| | TGLYETRIDLSKLGGD | |
| CasEnd-338 | MKKPYSIGLDIGTNSVGWAVVTDEYKVPSKKFKVLGNTDRKSIKKNLLGALL | 298 |
| | FDSGETAEATRLKRTARRRYTRRKNRIRYLQEIFAEEMNKVDESFFHRLEES | |
| | FLVEEDKRGERHPIFGNIVEEVAYHEKYPTIYHLRKHLADSPEKADLRLVYL | |
| | ALAHMIKFRGHFLIEGKLDTENTDVQKLFEHFLEVYDKTFEESRLSEITVNV | |
| | SEILTEKISKSRKLENLIKQFPTEKSNSFFGNLLALILGLQPNFKTNFSLSE | |
| | DAKLQFSKDTYDEDLEELLGQIGDDYADLFLAAKNLYDAILLSGILTVNDVS | |
| | TKAPLSASMVKRYDEHHQDLTKLKMFIREKAPAKYKEIFFDQSKNGYAGYID | |
| | GGAKQEDFYKYLKGILSKIEGSEYFLEKIEREDFLRKQRTFDNGSIPHQIHL | |
| | QELKAILRRQGVYYPFLKENQEKIEKILTFRIPYYVGPLARGNSRFAWASRK | |
| | SDETITPWNFDEVIDKEKSAEDFIERMTNNDKNLPEEKVLPKHSLLYEKFTV | |
| | YNELTKVKYVTEGMGKEEFFDANMKQEIFDGVFKKERKVTKDKLLNFLDKEF | |
| | EEFRIVDISGVEKNFNASLGTYHDLLKILNDKAFLDDKENENILEDIVLTLT | |
| | LFEDREMIRQRLQKYSDVFDKKQLKKLERRRYTGWGRLSAKLINGIRDKQSN | |
| | KTILDYLIDDGAANRNFMQLIHDDNLSFKEEIEKAQVIGESDSLHQIIADLA | |
| | GSPAIKKGILQSIKIVDELVKVMGRYNPENIVIEMARENQTTQKGQRNSRER | |
| | LKRLTESIKNLGSKILKEHPVDNTQLQNDKLYLYYLQNGRDMYTGEELDIDN | |
| | LSDYDVDHIIPQSFIKDDSIDNRVLVSSAKARGKSDDVPSIDVVRKMKSFWS | |
| | KLLKAKLISQRKFDNLTKAERGGLTELDKAGFIKRQLVETRQITKHVAQILD | |
| | ERFNTEFDENNKLIRDVKIITLKSKLVSQFRKEFELYKVREINDYHHAHDAY | |
| | LNAVVGKALIKKYPKLESEFVYGDYPVYNSYKLFKESNKEIGKATAKKFFYS | |
| | NIMNFFKSDDKLADGTIIERPQIEVNDETGEIAWKKVKHISTVKKVLSMPQV | |
| | NIVKKTEVQTGGFSKESILPKRNSDKLIARKKDWDPKKYGGFDSPTVAYSVL | |
| | VVADIEKGKAKKLKTVKELLGITIMERSAFEKNPVAFLEDKGYQNIQEDKII | |
| | KLPKYSLFELENGRKRLLASAGELQKGNELALPAKYVTLLYHAKHYEKFKEK | |
| | PEDIPKHLEYVNKHKLEFKELLNQILEFSKRYVLADKNLEKIEELYKNNKQA | |
| | SIKELATSFINLLTFTALGAPAAFKFFGNNIDRKRYTSTTEILNATLIHQSI | |
| | TGLYETRIDLSKLGED | |
| CasEnd-339 | MKKPYSIGLDIGTNSVGWAVLTDEYKVPSKKFKVLGNTDRQSIKKNLLGALL | 299 |
| | FDSGETAEATRLKRTARRRYTRRKNRILYLQEIFAEEMNKVDDSFFHRLEES | |
| | FLVEEDKRGERHPIFGNIVEEVAYHEEYPTIYHLRKHLADSTEKADLRLVYL | |
| | ALAHIIKFRGHFLIEGDLSAENTDVQKLFKKFLEVYDNTFEESHLSEETVDV | |
| | SVILTDKISKSRKLENLLAQYPNEKSNGFFGNLLKLSLGLQPNFKINFELSE | |
| | DAKLQFSKDTYEEDLENLLGQIGDDYADLFVAAKNLYDAILLSGILTVTDVS | |
| | TKAPLSASMIKRYDEHHQDLTKLKDFIRKNLPEKYKEIFFDDSKNGYAGYID | |
| | GGASQEEFYKYLKGLLSKLDGSEYFLDKIEREDFLRKQRTFDNGSIPHQIHL | |
| | QELKAILRRQGEYYPFLKENQEKIEKILTFRIPYYVGPLARGNSRFAWASRK | |
| | SDETITPWNFDEVIDKEASAEAFITRMTNYDKNLPEEKVLPKHSLLYEKFTV | |
| | YNELTKVKYVTEGMGKSEFFDANMKQEIFDGVFKKNRKVTKDKLLDFLDKEF | |
| | EEFRIVDLSGVEKRFNASLGTYHDLLKIIKDKEFLDDPENEEILEDIVLTLT | |
| | LFEDREMIRQRLSKYADLFDKKVIKKLERRRYTGWGRLSAKLINGIRDKQSG | |
| | KTILDYLIDDGRSNRNFMQLIHDDSLSFKEEIAKAQVIGETDSLHQVIADLA | |
| | GSPAIKKGILQSLKIVDELVKVMGRHNPENIVVEMARENQTTQKGQRNSRER | |
| | LKRLEDAIKELGSKILKEHPVENTQLQNDKLYLYYLQNGRDMYTGEELDIDR | |
| | LSDYDVDHIIPQSFIKDDSIDNRVLTSSAKARGKSDNVPSIEVVKKMKSFWY | |
| | KLLKAKLISQRKFDNLTKAERGGLTELDKAGFIKRQLVETRQITKHVAQILD | |
| | ERFNTEFDENNKLIRKVKIVTLKSKLVSQFRKEFEFYKVREINDYHHAHDAY | |
| | LNAVVGKALIKKYPKLESEFVYGDYPVYNSYKLVAKSDSEIGKATAKMFFYS | |
| | NIMNFFKSEIKLADGRIIERPVIERNDETGEIAWDKEKHIAIVKKVLSMPQV | |
| | NIVKKTEVQTGGFSKESILPKRNSDKLIARKKDWDTKKYGGFDSPTVAYSIL | |
| | VVADIEKGKSKKLKTVKELVGITIMERSKFEKNPVAFLERKGYQNIQEENII | |
| | KLPKYSLFELENGRKRLLASAGELQKGNELALPNHYVTLLYHAKRYEKDKEK | |
| | PEDIPKHLEYVDQHRDEFKEIFDQISEFSKRYILADKNLEKIKELYADNNEA | |
| | SIKELASSFINLLTFTALGAPAAFKFFGKNIDRKRYTSTTEILNATLIHQSI | |
| | TGLYETRIDLSKLGGD | |
| CasEnd-340 | MKKSYSIGLDIGTNSVGWAVITDEYKVPSKKFKVLGNTDRHSIKKNLIGALL | 300 |
| | FDSGETAEATRLKRTARRRYTRRKNRIRYLQEIFSSEMSKVDDSFFHRLEES | |
| | FLVEEDKRFERHPIFGNIVDEVAYHEKYPTIYHLRKKLADSPEKADLRLIYL | |
| | ALAHIIKFRGHFLIEGDLNTENTDVQKLFIQLVQTYNQLFEESHIDEEEVDA | |
| | KAILSAKLSKSRRLENLIAQLPGEKKNGLFGNLIALSLGLTPNFKSNFDLAE | |
| | DAKLQLSKDTYDEDLDNLLAQIGDQYADLFLAAKNLSDAILLSDILTVNSEI | |
| | TKAPLSASMIKRYDEHHQDLTLLKALVRQQLPEKYKEIFFDDSKNGYAGYID | |
| | GGASQEEFYKYIKPILEKMDGSEYFLAKIEREDFLRKQRTFDNGSIPHQIHL | |
| | GELHAILRRQEDFYPFLKENREKIEKILTFRIPYYVGPLARGNSRFAWMTRK | |
| | SEETITPWNFEEVVDKEASAQAFIERMTNFDKNLPNEKVLPKHSLLYEKFTV | |
| | YNELTKVKYVTEGMKKPEFLSGEQKKEIVDLLFKKNRKVTVKQLKEFYFKKI | |
| | ECFDSVDISGVEDRFNASLGTYHDLLKIIKDKEFLDNEENEDILEDIVLTLT | |
| | LFEDREMIEERLRKYAHLFDKKVLKQLKRRRYTGWGRLSRKLINGIRDKQSG | |
| | KTILDFLKSDGFANRNFMQLIHDDSLTFKEEIQKAQVEGQGDSLHEQIAELA | |
| | GSPAIKKGILQSIKIVDELVKVMGRHNPENIVIEMARENQTTQKGQKNSRER | |
| | MKRIEEGIKELGSQILKEHPVENTQLQNEKLYLYYLQNGRDMYVDQELDINR | |
| | LSDYDVDHIVPQSFLKDDSIDNKVLTRSDKARGKSDNVPSEEVVKKMKNYWR | |
| | QLLNAKLITQRKFDNLTKAERGGLSELDKAGFIKRQLVETRQITKHVAQILD | |
| | SRFNTEYDENDKLIREVKIITLKSKLVSDFRKDFQFYKVREINNYHHAHDAY | |
| | LNAVVGTALIKKYPKLESEFVYGDYKVYDVRKMIAKSEQEIGKATAKYFFYS | |
| | NIMNFFKTEITLANGEIRKRPQIETNEETGEIVWDKEKDFATVKKVLSMPQV | |
| | NIVKKTEVQTGGFSKESILPKRNSDKLIARKKDWDTKKYGGFDSPTVAYSVL | |
| | VVAKVEKGKSKKLKTVKELVGITIMERSSFEKNPVAFLEAKGYKNIQKDSII | |
| | KLPKYSLFELENGRKRLLASAGELQKGNELALPNKYVTLLYLASHYEKLKGS | |
| | PEDIELHLEYVKQHNYYFDDILDQISEFSERYILADKNLDKINSLYNENRDK | |
| | DINELAENFIHLFTFTSLGAPAAFKFFDTTIDRKRYTSTTEILNATLIHQSI | |
| | TGLYETRIDLSQLGGD | |
| CasEnd-341 | MKKPYSIGLDIGTNSVGWAVITDDYKVPAKKMKVLGNTDKSHIKKNLLGALL | 301 |
| | FDSGNTAEDRRLKRTARRRYTRRRNRLLYLQEIFSEEMSKVDESFFHRLDDS | |
| | FLVPEDKRGERHPIFGNLAEEVKYHKNFPTIYHLRKHLADSTEKADLRLVYL | |
| | ALAHIIKFRGHFLIEGDLDTENTDVQALFKDFLEVYDNTFEASHLSEQTVDA | |
| | SSILTDKISKSRKLENLLKHFPNEKKNSLFGNFLALSLGLQPNFKTNFQLSE | |
| | DAKLQFSKDTYEEDLENLLGQIGDDYADLFVAAKNLYDAILLSGILTVNDSS | |
| | TKAPLSASMVKRYEEHQKDLKELKQFIKQNLPDDYHEIFSDKTKNGYAGYID | |
| | GKTSQEEFYKYLKNILSKVEGSEYFLDKIEREDFLRKQRTFDNGSIPHQIHL | |
| | QEMHAILRRQGEYYPFLKENQEKIEKILTFRIPYYVGPLARGNSRFAWASRK | |
| | SDEKITPWNFDEVVDKESSAEAFITRMTNFDLYLPNEKVLPKHSLLYEKFTV | |
| | YNELTKVKYVTEQMGKAKFFDANMKKEIFDGLFKKNRKVTKKKLLNYLDKEF | |
| | DEFRIVDLTGLDKKFNASYGTYHDLLKILKDKEFLDDPENEDILEDIVLTLT | |
| | LFEDREMIRKRLSKYSDLFTKKQLKKLERRHYTGWGRLSAKLINGIRDKQSG | |
| | KTILDYLIDDGRSNRNFMQLINDDALSFKEEIAKAQVIGETDDLHQVVQDLA | |
| | GSPAIKKGILQSLKIVDELVKVMGNHEPENIVVEMARENQTTARGRRNSQQR | |
| | LKRLEDSIKNFGSKILKEHPVDNQQLQNDRLFLYYLQNGKDMYTGEELDINR | |
| | LSQYDIDHIIPQAFIKDDSIDNRVLTSSAKARGKSDDVPSEEVVKKMKSFWE | |
| | KLLRSGLISQRKFDNLTKAERGGLTEDDKAGFIKRQLVETRQITKHVARILD | |
| | ERFNTERDENNKRIRKVKIVTLKSNLVSQFRKEFELYKVREINDYHHAHDAY | |
| | LNAVVGKALLKKYPKLEPEFVYGEYPKYNSYKIDVRTNKEENKATAKYFFYS | |
| | NIMNMFKSTVKLADGSIIERPVIEANDETGEIAWDKTKHISTVKKVLSYPQV | |
| | NIVKKVEEQTGGFSKESILPKGDSDKLIARKTKWDTKKYGGFDSPTVAYSIL | |
| | VIADIEKGKSKKLKTVKELVGITIMEKNTFEKNPVAFLERKGYQNIQEENII | |
| | KLPKYSLFELENGRKRLLASAKELQKGNEMVLPNHLVTLLYHAKNINKSDEK | |
| | EEENPWHLSYVDKHRDEFKELLYYISNFSKKYTLAEKNLEKIEELYEQNNQE | |
| | DIKELASSFINLLTFTALGAPAAFKFFDKNIDRKRYTSTTEILNATLIHQSI | |
| | TGLYETRIDLSKLGGD | |
| CasEnd-342 | MDKKYSIGLDIGTNSVGWAVITDEYKVPSKKFKVLGNTDRQSIKKNLIGALL | 302 |
| | FDSGETAEATRLKRTARRRYTRRKNRIRYLQEIFAEEMAKVDDSFFHRLEES | |
| | FLVEEDKKHERHPIFGNIVDEVAYHEKYPTIYHLRKKLADSTDKADLRLIYL | |
| | ALAHMIKFRGHFLIEGDLNSENSDVDKLFIQLVQTYNQLFEENPINEEGVDA | |
| | KAILSAKLSKSRRLENLIAQFPGEKKNGLFGNLIALSLGLTPNFKSNFDLAE | |
| | DAKLQLSKDTYDEDLDNLLAQIGDQYADLFLAAKNLSDAILLSDILTVNSEI | |
| | TKAPLSASMIKRYDEHHQDLTLLKALVRQQLPEKYKEIFFDQSKNGYAGYID | |
| | GGASQEEFYKFIKPILEKMDGTEELLAKLNREDFLRKQRTFDNGSIPHQIHL | |
| | GELHAILRRQEDFYPFLKENREKIEKILTFRIPYYVGPLARGNSRFAWMTRK | |
| | SDETITPWNFEEVVDKEASAQAFIERMTNFDKNLPTEKVLPKHSLLYEYFTV | |
| | YNELTKVKYVTEGMRKPEFLSGEQKEAIVDLLFKTNRKVTVKQLKEDYFKKI | |
| | ECFDSVEISGVEDRFNASLGTYHDLLKIIKDKDFLDNEENEDILEDIVLTLT | |
| | LFEDREMIEERLKKYANLFDKKVLKQLKRRRYTGWGRLSRKLINGIRDKQSG | |
| | KTILDFLKSDGFANRNFMQLIHDDSLTFKEEIQKAQVSGQGDSLHEQIANLA | |
| | GSPAIKKGILQTVKIVDELVKVMGRHKPENIVIEMARENQTTQKGQKNSRER | |
| | MKRIEEGIKELGSQILKEHPVENTQLQNEKLYLYYLQNGRDMYVDQELDINR | |
| | LSDYDVDHIVPQSFLKDDSIDNKVLTRSDKARGKSDNVPSEEVVKKMKNYWR | |
| | QLLNAKLITQRKFDNLTKAERGGLSELDKAGFIKRQLVETRQITKHVAQILD | |
| | SRFNTERDENDKLIREVKIITLKSKLVSDFRKDFQFYKVREINNYHHAHDAY | |
| | LNAVVGTALIKKYPKLESEFVYGDYKVYDVRKMIAKSEQEIGKATAKYFFYS | |
| | NIMNFFKTEITLANGEIRKRPLIETNEETGEIVWDKEKDFATVRKVLSMPQV | |
| | NIVKKTEVQTGGFSKESILPKRNSDKLIARKKDWDTKKYGGFDSPTVAYSVL | |
| | VVAKVEKGKSKKLKTVKELVGITIMERSSFEKNPVDFLEAKGYKNVRKDLII | |
| | KLPKYSLFELENGRKRMLASAGELQKGNELALPQKYVTFLYLASHYEKLKGK | |
| | PEDNEQKQEYVEQHRDYFDEILEQISEFSERYILADKNLSKILELYNENEDS | |
| | SINEQAENFIHLFTFTALGAPAAFKFFDTTIDRKRYTSTTEVLDATLIHQSI | |
| | TGLYETRIDLSQLGGD | |
| CasEnd-343 | MKKKYSIGLDIGTNSVGWAVITDEYKVPSKKFKVLGNTDRQSIKKNLIGALL | 303 |
| | FDSGETAEATRLKRTARRRYTRRKNRIRYLQEIFAEEMSKVDDSFFQRLEES | |
| | FLVEEDKKHERHPIFGNIVDEVAYHEKYPTIYHLRKHLVDSTEKADLRLIYL | |
| | ALAHMIKFRGHFLIEGDLNSENSDVQKLFKQLVQTYNQLFEESAINEETVDA | |
| | SAILTAKLSKSRRLENLIAQFPGEKKNGLFGNLIALSLGLQPNFKSNENLAE | |
| | DAKLQFSKDTYEEDLENLLGQIGDQYADLFLAAKNLSDAILLSGILRANDES | |
| | TKAPLSASMIKRYDEHHQDLTLLKALVRKQLPEKYKEIFFDKTKNGYAGYID | |
| | GGASQEEFYKYIKPILEKMDGTEYLLAKLNREDLLRKQRTFDNGSIPHQIHL | |
| | GELHAILRRQEDYYPFLKENREKIEKILTFRIPYYVGPLARGNSRFAWMKRK | |
| | SNETITPWNFEEVVDKGASAQAFIERMTNFDKNLPSEKVLPKHSLLYEKFTV | |
| | YNELTKVKYVTEGMGKPEFLSSNMKKEIVDGLFKKNRKVTVKKLKEFYFKEI | |
| | ECFRIVDISGVEDRFNASLGTYHDLLKIIKDKDFLDNPENEDILEDIVLTLT | |
| | LFEDREMIEKRLKKYANLFDKEVMKKLKRRRYTGWGRLSRKLINGIRDKQSG | |
| | KTILDFLKSDGFANRNFMQLIHDDSLTFKEEIKKAQESGQGDSLHEQIANLA | |
| | GSPAIKKGILQTVKVVDELVKVMGRHKPENIVIEMARENQTTQKGQRNSRER | |
| | LKRIEEGIKELGSKILKEHPVENTQLQSDKLYLYYLQNGRDMYTGDELDIDR | |
| | LSDYDVDHIVPQSFIKDDSIDNKVLTRSKEARGKSDDVPSEEVVKKMKSYWR | |
| | QLLKAKLITQRKFDNLTKAERGGLTELDKAGFIKRQLVETRQITKHVAQILD | |
| | SRMNTERDENDKLIRDVKVITLKSKLVSDFRKDFQFYKVREINDYHHAHDAY | |
| | LNAVVGTALIKKYPKLESEFVYGDYPVYDSYKMIAKSEQEIGKATAKYFFYS | |
| | NIMNFFKTEITLANGEIRKRPLIETNGETGEIVWDKGRDFATVRKVLSMPQV | |
| | NIVKKTEVQTGGFSKESILPKRNSDKLIARKKDWDPKKYGGFDSPTVAYSVL | |
| | VVAKVEKGKSKKLKSVKELLGITIMERSSFEKNPIDFLEAKGYKEVKKDLII | |
| | KLPKYSLFELENGRKRMLASAGELQKGNELALPSKYVNFLYLASHYEKLKGS | |
| | PEDNEQKQLFVEQHKHYLDEIIEQISEFSKRVILADANLDKVLSAYNKHRDK | |
| | PIREQAENIIHLFTLTNLGAPAAFKYFDTTIDRKRYTSTKEVLDATLIHQSI | |
| | TGLYETRIDLSQLGGD | |
| CasEnd-344 | MDKKYSIGLDIGTNSVGWAVITDEYKVPSKKFKVLGNTDRHSIKKNLLGALL | 304 |
| | FDSGETAEATRLKRTARRRYTRRKNRIRYLQEIFAEEMAKVDDSFFHRLEES | |
| | FLVEEDKRGERHPIFGNIVDEVAYHENYPTIYHLRKKLADSPQKADLRLIYL | |
| | ALAHIIKFRGHFLIEGDLNAENTDVQKLFKQLVEIYDKLFEESHLSEETVDA | |
| | KSILTAKSSKSRRLENLIKQFPNEKKNGLFGNLLALSLGLQPNFKINFELAE | |
| | DAKLQFSKDTYEEDLENLLAQIGDQYADLFLAAKNLYDAILLSGILTVNTEI | |
| | TKAPLSASMVKRYDEHHQDLTLLKKLIREQLPEKYKEIFFDKSKNGYAGYID | |
| | GGASQEDFYKYLKPILSKLDGSEYFLDKIEREDFLRKQRTFDNGSIPHQIHL | |
| | GELHAILRRQEDFYPFLKENKEKIEKILTFRIPYYVGPLARGNSRFAWASRK | |
| | SDETITPWNFEEVVDQEASAEVFIERMTNYDKNLPEEKVLPKHSLLYEKFTV | |
| | YNELTKVKYITEGMRKPAFFDANQKEEIVDLLFKKNRKVTVKKLKEFLFKEI | |
| | EEFDGVDISGVEKAFNASLGTYHDLLKIIKDKDFLDNEENEDILEDIVLTLT | |
| | LFEDREMIEERLQKYAHLFDKKVLKKLKRRRYTGWGRLSAKLINGIRDKQTG | |
| | KTILDYLIDDGFANRNFMQLIHDDSLSFKEEIQKAQVIGKGDSLHEVIADLA | |
| | GSPAIKKGILQSLKIVDELVKVMGRHAPENIVIEMARENQTTQKGQKNSRER | |
| | LKRLEESIKNLGSKILKEHPVENTQLQNDKLYLYYLQNGKDMYTGEELDIDN | |
| | LSDYDVDHIIPQSFIKDDSIDNRVLTSSKKARGKSDNVPSEEVVKKMKNFWM | |
| | RLLKAKLISQRKFDNLTKAERGGLSELDKAGFIKRQLVETRQITKHVAQILD | |
| | SRFNTKYDENDKLIRKVKIITLKSKLVSDFRKDFGLYKVREINDYHHAHDAY | |
| | LNAVVGTALIKKYPKLESEFVYGDYKVYNSYRMIAKSEQEIGKATAKYFFYS | |
| | NIMNFFKKKITLANGEIRKRPLIETNDETGEIAWDKVKDIATVRKVLSMPQV | |
| | NIVKKTEVQTGGFSKESILPKRDSDKLIARKKDWDTKKYGGFDSPTVAYSVL | |
| | VVADVEKGKAKKLKTVKELVGITIMERSSFEKDPIAFLEAKGYQNIQKDTII | |
| | KLPKYSLFELENGRKRLLASAGELQKGNELALPQKYVTLLYHAKHYEKLKES | |
| | PEDNSEHKEYVEQHKDEFDEILDQVSEFSERYILADKNLEKIQELYKQNRDF | |
| | DIEELASSFINLLTFTALGAPAAFKFFDTKIDRKRYTSTTEILNATLIHQSI | |
| | TGLYETRIDLSQLGGD | |
| CasEnd-345 | MDKPYSIGLDIGTNSVGWAVVTDEYKVPSKKFKVLGNTDRKSIKKNMLGALL | 305 |
| | FDSGETAEATRLKRTARRRYTRRKNRICYLQEIFSNEMAKVDENFFHRLEES | |
| | FLVEEDKRNERHPIFGNIVEEVAYHEKYPTIYHLRKHLADSPEKADLRLVYL | |
| | ALAHIIKFRGHFLIEGDLNSENTDVDKLFIQLVQTYNQLFEENPINASGVDA | |
| | KAILSARLSKSRRLENLIAQLPGEKKNGLFGNLIALSLGLTPNFKSNEDLAE | |
| | DAKLQLSKDTYDDDLDNLLAQIGDQYADLFLAAKNLSDAILLSDILRVNTEI | |
| | TKAPLSASMIKRYDEHHQDLTLLKALVRQQLPEKYKEIFFDQSKNGYAGYID | |
| | GGASQEEFYKFIKPILEKMDGTEELLVKLNREDLLRKQRTFDNGSIPHQIHL | |
| | GELHAILRRQEDFYPFLKDNREKIEKILTFRIPYYVGPLARGNSRFAWMTRK | |
| | SEETITPWNFEEVVDKGASAQSFIERMTNFDKNLPNEKVLPKHSLLYEYFTV | |
| | YNELTKVKYVTEGMRKPAFLSGEQKKAIVDLLFKTNRKVTVKQLKEDYFKKI | |
| | ECFDSVEISGVEDRFNASLGTYHDLLKIIKDKDFLDNEENEDILEDIVLTLT | |
| | LFEDREMIEERLKTYAHLFDDKVMKQLKRRRYTGWGRLSRKLINGIRDKQSG | |
| | KTILDFLKSDGFANRNFMQLIHDDSLTFKEDIQKAQVSGQGESLHEQIANLA | |
| | GSPAIKKGILQTLKIVDEIVKVMGRYAPENIVVEMARENQTTQKGQKNSRER | |
| | MKRIEEGIKELGSQILKEHPVENTQLQNEKLYLYYLQNGRDMYVDQELDINR | |
| | LSDYDVDHIVPQSFLKDDSIDNKVLTRSDKARGKSDNVPSEEVVKKMKNYWR | |
| | QLLNAKLITQRKFDNLTKAERGGLSELDKAGFIKRQLVETRQITKHVAQILD | |
| | ERFNAEVDDSDKLIRDTKIITLKSKLVSDFRKDFGLYKVREINNYHHAHDAY | |
| | LNAVVGKALIKKYPKLESEFVYGDYKVFDVRKLIRKSGKEIGKATAKYFFYS | |
| | NIMNFFKSDVTLANGKLRKRPNIEVNEETGEIIWDKEKDIATIKKVLSMPQV | |
| | NIVKKTEVQTGGFSKESILPKRDSDKLIARKKDWDTSKYGGEDSPTVAYSVL | |
| | VIAKIEKGKAKKLKTVKELVGITIMERSAFEKDPVAFLEDKGYQDIQEELLI | |
| | KLPKYSLFELENGRKRLLASAGELQKGNELALPNHYVTLLYHAKHYEKLKGN | |
| | SEDNKESLNYIEEHREEFDELFDQVIEFAERYILADANIEKIKTLYEQNSEA | |
| | SLEELSENFLHLLKFTALGAPAAFKFFGADIDRKRYTSTKEILNATLIHQSI | |
| | TGLYETRIDLSKLGGD | |
| CasEnd-346 | MDKKYSIGLDIGTNSVGWAVITDEYKVPSKKFKVLGNTDRHSIKKNLIGALL | 306 |
| | FDSGETAEATRLKRTARRRYTRRKNRIRYLQEIFSEEMAKVDDSFFHRLEES | |
| | FLVEEDKKHERHPIFGNIVDEVAYHEKYPTIYHLRKKLADSTEKADLRLIYL | |
| | ALAHIIKFRGHFLIEGDLNSDNSDVDKLFIQLVQTYNQLFEENPINESGVDA | |
| | KAILSARLSKSRRLENLIAQFPGEKKNGLFGNLIALSLGLTPNFKSNEDLAE | |
| | DAKLQLSKDTYDDDLDNLLAQIGDQYADLFLAAKNLSDAILLSDILTVNSEI | |
| | TKAPLSASMIKRYDEHHQDLTLLKALVRQQLPEKYKEIFFDDSKNGYAGYID | |
| | GGASQEEFYKFIKPILEKMDGTEELLAKLNREDLLRKQRTFDNGSIPHQIHL | |
| | GELHAILRRQEDFYPFLKENREKIEKILTFRIPYYVGPLARGNSRFAWMTRK | |
| | SEETITPWNFEEVVDKGASAQSFIERMTNFDKNLPNEKVLPKHSLLYEYFTV | |
| | YNELTKVKYVTEGMRKPEFLSGEQKEAIVDLLFKTNRKVTVKQLKEDYFKKI | |
| | ECFDSVEISGVEDRFNASLGTYHDLLKIIKDKDFLDNEENEDILEDIVLTLT | |
| | LFEDKEMIEERLEKYAHLFDKKVLKKLKRRRYTGWGRLSAKLINGIRDKQSG | |
| | KTILDFLKSDGFANRNFMQLIHDDSLTFKEAIQKAQVSGQGDSLHEQIANLA | |
| | GSPAIKKGILQTVKIVDELVKVMGRHKPENIVIEMARENQTTQKGQKNSRER | |
| | MKRIEEGIKELGSQILKEHPVENTQLQNEKLYLYYLQNGRDMYVDQELDINR | |
| | LSDYDVDHIVPQSFLKDDSIDNKVLTRSDKARGKSDNVPSEEVVKKMKNYWR | |
| | QLLNAKLITQRKFDNLTKAERGGLSELDKAGFIKRQLVETRQITKHVAQILD | |
| | SRMNTKRDENDKLIREVKIITLKSKLVSDFRKDFQFYKVREINNYHHAHDAY | |
| | LNAVVGTALIKKYPKLESEFVYGDYKVYDVRKMIAKSEQEIGKATAKYFFYS | |
| | NIMNFFKTEVTLANGEIRKRPLIETNEETGEIVWDKGKDFATVRKVLSMPQV | |
| | NIVKKTEVQTGGFSKESILPKRNSDKLIARKKDWDTKKYGGFDSPTVAYSVL | |
| | VVAKVEKGKSKKLKSVKELVGITIMERSSFEKDPVDFLEAKGYKNVQKDLII | |
| | KLPKYSLFELENGRKRLLASAGELQKGNELALPQKYVTLLYLASHYEKLKGS | |
| | PEDNEKKQYYVEQHRHYFDEIIEQISEFSERYILADKNLDKIKSLYKEHEDY | |
| | SISELAENFIHLFTFTALGAPAAFKFFDTTIDRKRYTSTTEILDATLIHQSI | |
| | TGLYETRIDLSQLGGD | |
| CasEnd-347 | MDKKYSIGLDIGTNSVGWAVITDEYKVPSKKFKVLGNTDRHSIKKNLIGALL | 307 |
| | FDSGETAEATRLKRTARRRYTRRKNRICYLQEIFSNEMAKVDPNFFHRLEES | |
| | FLVEEDKKHERHPIFGNIVDEVAYHEKYPTIYHLRKKLVDSTDKADLRLIYL | |
| | ALSDLIKNRGNFLIKGELPPGPLSVEELMKKLFAKYAELNPDNPVELNGVDL | |
| | SSILLARESPSSRLGRFVSQFPGVSKTSLLGQLFALILGLTPSFKSAFNLEE | |
| | DFKLSLKDDSFDDDLDYLVDLLGDKYKELFELARELHAAILYSKFYRDNPDI | |
| | TKAPLSASMIKRYDEHHQDLTLLKALVRQQLPEKYKEIFFDQSKNGYAGYID | |
| | GGASQEEFYKFIKPILEKMDGTEELLVKLNREDLLRKQRTFDNGRIPYWINL | |
| | REIKAILENQEKFYPFLKENKEKILKILTFRIPYYVGELSKGDSPDSVAVRK | |
| | TNNTITPWNFEEDVDLKKSAKLYEESMRNTDPYLPGEKVLPKHSLTYQEFLL | |
| | YNELSSVKLLTPDGKEPKPLTGEEREQIINHLFLKYRKVTVEQLKEEFFKEV | |
| | YKWPEATILGVKGRFKANLETYHDLLKIIKNEEFILNEKNREILDEIVEILT | |
| | LFKDRELVEEALKKYSHLFSEKEMKRLKRRRFTGWGRYSRKLIDGLKHKKTG | |
| | KTVLDFLKDNGKNPLTFMQILHSEELDFKKILKKKTVPDKGDSLHEHIANLA | |
| | GSPAIKKGILQTVKVVDELVKVMGRHKPENIVIEMARENQTTQKGQKNSRER | |
| | MKRIEEGIKELGSQILKEHPVENTQLQNEKLYLYYLQNGRDMYVDQELDINR | |
| | LSDYDVDHIVPQSFLKDDSIDNKVLTRSDKARGKSDNVPSEEVVKKMKNYWR | |
| | QLLNAKLITQRKFDNLTKAERGGLSELDKAGFIKRQLVETRQITKHVAQILD | |
| | SRMNTKYDENDKLIREVKVITLKSKLVSDFRKDFQFYKVREINNYHHAHDAY | |
| | LNAVVGTALIKKYPKLESEFVVGKYKVEDVRKMFAKSEDEIGKATAKYFFYS | |
| | NIMNFFKTEITNENGGIEKRDPTSTNGETGEISWDKGRDFATVRKVLSMPQV | |
| | NIVKKTEVQTGGFSKESILPKRNSDKLIARKKDWDPKKYGGFDSPTVAYSVL | |
| | VVAKVEKGKSKELKSVKELLGITIMERSSFEKNPLDFLKAKGYTDVDKDKLI | |
| | YLPKYSLFELGNGRKVLLASAGELQKGNELALPFKYQEFLYLAAHLDDLKGK | |
| | PEEQEQKQLFVEQNKHYLDEIMEQISEFSKRVVNAGAQLDKVKAAWEKHKDK | |
| | PIREQAENIIHLFTLTNLGAPAAFKYFDTTIDRKRYTSTKEVLDATLIHQSI | |
| | TGLYETRIDLKQLGGD | |
| CasEnd-348 | MKKKYSIGLDIGTNSVGWAVITDEYKVPSKKFKVLGNTDRHSIKKNLIGALL | 308 |
| | FDSGETAEATRLKRTARRRYTRRKNRICYLQEIFSSEMSKVDDSFFHRLEES | |
| | FLVEEDKRNERHPIFGNIVDEVAYHEKYPTIYHLRKKLADSTEKADLRLIYL | |
| | ALAHMIKFRGHFLIEGDLNAENSDVDKLFIQLVQTYNQLFEENPIEEELVDA | |
| | KAILSAKLSKSRRLENLIAQLPGEKKNGLFGNLLALSLGLTPNFKSNEDLSE | |
| | DAKLQLSKDTYDDDLDNLLAQIGDQYADLFLAAKNLSDAILLSDILTVNGES | |
| | TKAPLSASMIKRYDEHHQDLTLLKTLVRQQLPEKYKEIFFDDSKNGYAGYID | |
| | GGASQEEFYKYIKPILEKMDGTEEFLAKLEREDFLRKQRTFDNGSIPHQIHL | |
| | GELHAILRRQEDFYPFLKENREKIEKILTFRIPYYVGPLARGNSRFAWMTRK | |
| | SEETITPWNFEEVVDKEASAQSFIERMTNFDKNLPKEKVLPKHSLLYEYFTV | |
| | YNELTKVKYVTEGMRKPEFLSAGQKKAIVDLLFKTNRKVTVKQLKEDYFKKI | |
| | ECFDTVEISGVEDRFNASLGTYHDLLKIIKDKDFLDNEENEAILEDIVLTLT | |
| | LFEDREMIEERLAKYADLFDKKVLKQLKRRRYTGWGRLSRKLINGIRDKQSG | |
| | KTILDFLKDDGFANRNFMQLIHDDSLTFKEEIQKAQVIGKGDSLHEQIANLA | |
| | GSPAIKKGILQSIKIVDELVKVMGRHAPENIVIEMARENQTTQKGQKNSRER | |
| | MKRIEEGIKELGSQILKEHPVENTQLQNEKLYLYYLQNGRDMYVDQELDINR | |
| | LSDYDVDHIVPQSFLKDDSIDNKVLTRSDKARGKSDNVPSEEVVKKMKNYWR | |
| | QLLNAKLITQRKFDNLTKAERGGLSELDKAGFIKRQLVETRQITKHVAQILD | |
| | SRFNTERDENDKLIRRVKIITLKSKLVSDFRKDFQFYKVREINDYHHAHDAY | |
| | LNAVVGTALIKKYPKLESEFVYGDYKVYDVRKMIAKSEQEIGKATAKYFFYS | |
| | NIMNFFKTEITLANGEIRKRPLIETNTETGEIVWDKGKDFATVRKVLSMPQV | |
| | NIVKKTEVQTGGFSKESILPKRESDKLIARKKDWDTKKYGGFDSPTVAYSVL | |
| | VVAKVEKGKTKKLKTVKELVGITIMERSSFEKDPVSFLEAKGYQNIQKDLII | |
| | KLPKYSLFELENGRKRLLASAGELQKGNELALPQKYVILLYHASHYEKLKGK | |
| | EEDNSQHREYVEQHRYEFDEILDQIIEFSERYILADKNLEKILELYNENEAA | |
| | DIEELAENFIHLFTFTALGAPAAFKFFDTTIDRKRYTSTTEILDATLIHQSI | |
| | TGLYETRIDLSQLGGD | |
| CasEnd-349 | MDKPYSIGLDIGTNSVGWAVVTDEYKVPSKKFKVLGNTDRHSIKKNLLGALL | 309 |
| | FDSGETAEATRLKRTARRRYTRRKNRIRYLQEIFAEEMNKVDDSFFHRLEES | |
| | FLVEEDKRGERHPIFGNIVEEVAYHEEYPTIYHLRKHLADSPEKADLRLVYL | |
| | ALAHIIKFRGHFLIEGELDTENTDIQRLFKEFLAVYDNTFEESHLSEQNVQA | |
| | EEILTDKISKSAKKERVLKLFPNEKSNGFFAEFLKLIVGNQADFKKHFELSE | |
| | KAPLQFSKDTYEEDLENLLGQIGDDYADLFVSAKKLYDSILLSGILTVTTEI | |
| | TKAPLSASMVKRYDEHHQDLTKLKQFIRENLPDKYKEIFFDKSKNGYAGYID | |
| | GGATQEDFYKYLKGLLNKIEGSEYFLDKIEREDFLRKQRTFDNGSIPHQIHL | |
| | QELRAIIRRQGEYYPFLKENQDKIEKILTFRIPYYVGPLARGNSRFAWLSRK | |
| | SDETITPWNFDEIVDKESSAEAFINRMTNYDKNLPEEKVLPKHSLLYEKFTV | |
| | YNELTKVKYITEQMRKPAFFDANMKQEIFDGVFKVYRKVTKDKLLDFLEKEF | |
| | DEFRIVDLSGVEKAFNASLGTYHDLKKILKDKDFLDNSKNEKILEDIVLTLT | |
| | LFEDREMIRKRLSKYADLLTKEQLKKLERRRYTGWGRLSAKLINGIRDKETG | |
| | KTILDYLIDDGFSNRNFMQLIHDDSLSFKEEIAKAQVIGETDSLHQVIADLA | |
| | GSPAIKKGILQSLKIVDELVKVMGRHAPENIVVEMARENQTTQKGQRNSRER | |
| | LKRLTDSIKELGSNILKEHPVDNTQLQNDKLYLYYLQNGKDMYTGEELDIDK | |
| | LSDYDVDHIIPQSFIKDDSIDNRVLVSSAKARGKSDDVPSIEVVRKMKSFWS | |
| | QLLDAKLISQRKFDNLTKAERGGLTELDKAGFIKRQLVETRQITKHVAQILD | |
| | ERFNTKYDENDKLIRDVKIVTLKSKLVSNFRKEFELYKVREINDYHHAHDAY | |
| | LNAVVGKALIKKYPKLESEFVYGDYPVFNSYKMIAKSEQEIGKATAKYFFYS | |
| | NLMNFFKSDVTLANGEIRKRPLVETNDENGEIIWDKTKHISTVKKVLSMPQV | |
| | NIVKKTEVQTGGFSKESILPKRNSDKLIARKKDWDTKKYGGFDSPTVAYSVL | |
| | VIADIEKGKAKKLKTVKELVGITIMERSAFERDPVAFLENKGYQNIRKENII | |
| | KLPKYSLFELENGRKRLLASAGELQKGNELALPAHYVTLLYHAKNYEKIKES | |
| | PEDNPKHLEYVVKHRDEFKELLDQISEFSKRYILADKNLEKIEELYAQNEEA | |
| | DIEELASSFINLLTFTALGAPAAFKFFGKKIDRKRYTSTTEILNATLIHQSI | |
| | TGLYETRIDLSQLGGD | |
| CasEnd-350 | MDKKYSIGLDIGTNSVGWAVITDEYKVPSKKFKVLGNTDRHSIKKNLIGALL | 310 |
| | FDSGETAEATRLKRTARRRYTRRKNRICYLQEIFSNEMAKVDESFFHRLEES | |
| | FLVEEDKQGERHPIFGNIVDEVAYHEKYPTIYHLRKHLADSTEKADLRLVYL | |
| | ALAHIIKFRGHFLIEGDLNSENTDVQKLFKQFVQVYNRLFEESHLNEETVDA | |
| | ESILTEKISKSRRLENLIAQFPNEKKNGLFGNLIALSLGLQPNFKSNFELSE | |
| | DAKLQLSKDTYEEDLEELLGQIGDEYADLFVAAKNLYDAILLSGILTVNDES | |
| | TKAPLSASMIKRYDEHHQDLTLLKEFVRQNLPEKYKEIFFDKTKNGYAGYID | |
| | GGASQEEFYKYIKPILEKIDGSEYFLEKIEREDFLRKQRTFDNGSIPHQIHL | |
| | QELHAILRRQEKYYPFLKENQEKIEKILTFRIPYYVGPLARGNSRFAWVTRK | |
| | SDETITPWNFEEVVDKEKSAERFIERMTNNDKNLPDEKVLPKHSLLYEKFTV | |
| | YNELTKVKYVTEGMGKAKFFDANMKQEIFDGLFKKHRKVTKKKLLDELDKEF | |
| | EEFRIVDISGVEDAFNASLGTYHDLLKIIKDKEFLDNPENEDILEDIVLTLT | |
| | LFEDREMIEKRLQKYADLFTKKQLKKLKRRRYTGWGRLSKKLINGIRDKQSG | |
| | KTILDYLIDDGYSNRNFMQLIHDDGLSFKEEIKKAQVTGDSDSLHEHIANLA | |
| | GSPAIKKGILQTVKVVDELVKVMGRHKPENIVIEMARENQTTQKGQKNSRER | |
| | MKRIEEGIKELGSQILKEHPVENTQLQNEKLYLYYLQNGRDMYVDQELDINR | |
| | LSDYDVDHIVPQSFLKDDSIDNKVLTRSDKARGKSDNVPSEEVVKKMKNYWR | |
| | QLLNAKLITQRKFDNLTKAERGGLSELDKAGFIKRQLVETRQITKHVAQILD | |
| | SRMNTKYDENDKLIREVKVITLKSKLVSDFRKDFQFYKVREINNYHHAHDAY | |
| | LNAVVGTALIKKYPKLESEFVYGDYKVYDVRKMIAKSEQEIGKATAKYFFYS | |
| | NIMNFFKTEITLANGEIRKRPLIETNGETGEIVWDKGRDFATVRKVLSMPQV | |
| | NIVKKTEVQTGGFSKESILPKRDSDKLIARKKDWDTKKYGGFDSPTVAYSVL | |
| | VVAKIEKGKTSKLKTVKELVGITIMERSRFEKNPVKFLEAKGYQNIRKDKII | |
| | KLPKYSLFELENGRKRLLASAGELQKGNELALPKKYVTLLYHAKHYEKLKEK | |
| | SEDEEKHLNYVQKHLSEFDEIFDQISEFSKRYVLADKNLEKIEELYSQIESK | |
| | SISELAESFINLLTFTALGAPAAFKFLGLTIDRKRYTSTTEILSATLIHQSI | |
| | TGLYETRIDLSKLGGD | |
| CasEnd-351 | MDKPYSIGLDIGTNSVGWAVITDEYKVPSKKFKVLGNTDRHSIKKNLWGALL | 311 |
| | FDSGETAEATRLKRTARRRYTRRKNRIRYLQEIFSEEMSKVDDSFFQRLEES | |
| | FLVEEDKRHERHPIFGNIVDEVAYHEKYPTIYHLRKHLADSTEKADLRLIYL | |
| | ALAHIIKFRGHFLIEGDLNAENTDVQKLFIQLVQTYNQTFEEDHISEQGVDA | |
| | EAILTAKTSKSRRLENLIKQFPGEKKNGLFGNLIALSLGLQPNFKTNFDLPE | |
| | DAKLQFSKDTYDEDLENLLAQIGDQYADLFLAAKNLYDAILLSGILTVKTEI | |
| | TKAPLSASMIKRYDEHHQDLTLLKAFIREQLPEKYKEIFFDKSKNGYAGYID | |
| | GGASQEEFYKYIKPILSKIEGAEYFLDKIEREDFLRKQRTFDNGSIPHQIHL | |
| | KELKAILRRQGEFYPFLKENKEKIEKILTFRIPYYVGPLARGNSRFAWMSRK | |
| | SEETITPWNFEEVVDKEASAEAFIERMTNFDKNLPEEKVLPKHSLLYEKFTV | |
| | YNELTKVKYVTEGMRKPAFFSGEQKKEIVDELFKKNRKVTVKQLLEHLFKEF | |
| | DEFDSVEISGVEDQFNASLGTYHDLLKIIKDKEFLDNEENEDILEDIVLTLT | |
| | LFEDREMIKQRLSKYADLFDKKVLKKLKRRRYTGWGRLSAKLINGIRDKQTG | |
| | KTILDYLIDDGFANRNFMQLIHDDSLSFKEEIAKAQVIGKTDSLHEVIANLA | |
| | GSPAIKKGILQSIKIVDELVKVMGRHNPENIVIEMARENQTTQKGQRNSRER | |
| | LKRLEEVIKKLGSQILKEHPVENTQLQNDKLYLYYLQNGKDMYTGEELDIDR | |
| | LSDYDVDHIIPQSFIKDDSIDNRVLTSSDKARGKSDNVPSIEVVKKMKSYWQ | |
| | QLLNSKLISQRKFDNLTKAERGGLSELDKAGFIKRQLVETRQITKHVAQILD | |
| | SRFNTKYDENDKLIRRVKIITLKSKLVSDFRKDFGFYKVREINDYHHAHDAY | |
| | LNAVVGTALIKKYPKLESEFVYGDYKVYDSRKMIAKSEQEIGKATAKYFFYS | |
| | NIMNFFKKEITLANGEIRKRPLIETNEETGEIVWDKTKDFATVRKVLSMPQV | |
| | NIVKKTEVQTGGFSKESILPKRNSDKLIARKKDWDTKKYGGFDSPTVAYSVL | |
| | VVADVEKGKAKKLKTVKELVGITIMERSSFEKDPVLFLESKGYKNIQKDKII | |
| | KLPKYSLFELENGRKRLLASAGELQKGNELALPQKYVTLLYHAKKYEKLKGS | |
| | PEDNPKHLEYVEEHRDEFDEILDQISEFSKRYILADANLEKIKELYRKNADS | |
| | SISELASSFINLFTFTALGAPAAFKFFDEDIDRKRYTSTTEILNATLIHQSI | |
| | TGLYETRIDLSQLGGD | |
| CasEnd-352 | MDKKYSIGLDIGTNSVGWAVITDEYKVPSKKFKVLGNTDRHSIKKNLIGALL | 312 |
| | FDSGETAEATRLKRTARRRYTRRKNRICYLQEIFSNEMAKVDDSFFHRLEES | |
| | FLVEEDKRGERHPIFGNIVDEVAYHEKYPTIYHLRKHLADSTEKADLRLIYL | |
| | ALAHMIKFRGHFLIEGDLNSENTDVQKLFKKFVQVYNQTFEESALSEIGVDA | |
| | KSILTAKVSKSRRLENLIKLYPNEKKNGLFGNLIALSLGLQPNFKKNENLSE | |
| | DAKLQFSKDTYDEDLENLLGQIGDEYADLFVAAKNLYDAILLSGILTVNDES | |
| | TKAPLSASMVKRYDEHHQDLTLLKHFVRKQLPEKYKEIFFDKSKNGYAGYID | |
| | GGASQEDFYKYIKPILEKQDGTEYLLDKIEREDFLRKQRTFDNGSIPHQIHL | |
| | QELHAILRRQEEYYPFLKENQEKIEKILTFRIPYYVGPLARGNSRFAWMSRK | |
| | SDETITPWNFEEVVDKEASAEAFIERMTNFDKNLPEEKVLPKHSLLYEKFTV | |
| | YNELTKVKYVTEQMGKAEFFDSNQKEEIFDGLFKKERKVTKKKLLDFLFKEF | |
| | EEFRIVDLSGVEDAFNASLGTYHDLLKIIKDKDFLDDEENEDILEDIILTLT | |
| | LFEDREMIEKRLQKYADLFTKDQLKKLERRRYTGWGRLSKKLINGIRDKQSG | |
| | KTILDYLIDDGFTNRNFMQLIHDDSLSFKEEIAKAQVKGDEDSLHEHIANLA | |
| | GSPAIKKGILQTVKVVDELVKVMGRHKPENIVIEMARENQTTQKGQKNSRER | |
| | MKRIEEGIKELGSQILKEHPVENTQLQNEKLYLYYLQNGRDMYVDQELDINR | |
| | LSDYDVDHIVPQSFLKDDSIDNKVLTRSDKARGKSDNVPSEEVVKKMKNYWR | |
| | QLLNAKLITQRKFDNLTKAERGGLSELDKAGFIKRQLVETRQITKHVAQILD | |
| | SRMNTKYDENDKLIREVKVITLKSKLVSDFRKDFQFYKVREINNYHHAHDAY | |
| | LNAVVGTALIKKYPKLESEFVYGDYKVYDVRKMIAKSEQEIGKATAKYFFYS | |
| | NIMNFFKTEITLANGEIRKRPLIETNGETGEIVWDKGRDFATVRKVLSMPQV | |
| | NIVKKTEVQTGGFSKESILPKRDSDKLIARKKDWDTKKYGGFDSPTVAYSVL | |
| | VVADIEKGKNKKLKTVKELVGITIMERSSFEKDPVDFLEKKGYQNIQEELII | |
| | KLPKYSLFELENGRKRLLASAGELQKGNELALPNKYVTLLYHAHHYEKSKEK | |
| | PEDNEKHLKYVEKHKNEFDEILDQIEEFSKRYVLADKNLEKIVALYSKNENA | |
| | SIEELASSFINLLTFTALGAPAAFKFFGLKIDRKRYTSTTEILNSTLIHQSI | |
| | TGLYETRIDLSKLGGD | |
| CasEnd-353 | MDKKYSIGLDIGTNSVGWAVVTDDYKVPSKKFKVLGNTDRKSIKKNLLGALL | 313 |
| | FDSGETAEATRLKRTARRRYTRRKNRICYLQEIFSNEMAKVDESFFHRLEES | |
| | FLVEEDKRNERHPIFGNIVEEVAYHEKFPTIYHLRKKLADSDEKADLRLVYL | |
| | ALAHIIKFRGHFLIEGDLNAENTDVDKLFIQLVQTYNQLFEENPINASGVDA | |
| | KAILSARLSKSRRLENLIAQLPGEKKNGLFGNLIALSLGLTPNFKSNFDLAE | |
| | DAKLQLSKDTYDDDLDNLLAQIGDQYADLFLAAKNLSDAILLSDILRVKDES | |
| | TKAPLSASMVKRYEEHHKDLTLLKNFIRKQLPEKYKEIFFDESKNGYAGYID | |
| | GGASQEEFYKYLKKILEKIDGSEEFLDKIEREDFLRKQRTFDNGSIPHQIHL | |
| | QELHAILRRQEKYYPFLKENQEKIEQILTFRIPYYVGPLARGNSRFAWLSRK | |
| | SDETITPWNFDEVVDKEASAEAFIERMTNFDKNLPDEKVLPKHSLLYEKFTV | |
| | YNELTKVKYVTEGGKKPEFFSANQKQEIFDNVFKKNRKVTKKQLLDFLKKEF | |
| | DEFRIVDISGVEDRFNASLGTYHDLLKIIKDKDFLDNEENEEILEDIILTLT | |
| | LFEDREMIKERLEKYADLFDKEQLKKLERRRYTGWGRLSAKLINGIRDKQTG | |
| | KTILDYLIDDGFANRNFMQLIHDDSLTFKEEIAKAQVIGETDSLHELIANLA | |
| | GSPAIKKGILQSLKIVDELVKVMGRYAPENIVVEMARENQTTAKGQKNSRER | |
| | MKRIEEGIKELGSQILKEHPVENTQLQNEKLYLYYLQNGRDMYVDQELDINR | |
| | LSDYDVDHIVPQSFLKDDSIDNKVLTRSDKARGKSDNVPSEEVVKKMKNYWR | |
| | QLLNAKLITQRKFDNLTKAERGGLTDDDKAGFIKRQLVETRQITKHVAQILD | |
| | SRFNTEYDENGKLIRDVKIITLKSKLVSQFRKDFELYKVREINDYHHAHDAY | |
| | LNAVVGTALIKKYPKLESEFVYGDYKKYNLRKLIAKSDKEIGKATAKMFFYS | |
| | NIMNFFKTDVKLADGEIRKRPLIEVNEETGEIAWDKEKHIATVKKVLSMPQV | |
| | NIVKKTEVQTGGFSKESILPKRDSDKLIARKKDWDTKKYGGFDSPTVAYSVL | |
| | VVADIEKGKAKKLKTVKELVGITIMERSAFEKNPVAFLEDKGYQNIQEDNLI | |
| | KLPKYSLFELENGRKRLLASAGELQKGNELALPNHLVTLLYHAKHIEKLDGK | |
| | PEDNKEKLNYVEEHREEFDEILDQVIEFAKRYILADANIEKIKKLYEKNRSA | |
| | DIEELASSFINLLTFTALGAPAAFKFFGKTIDRKRYTSTTEILNATLIHQSI | |
| | TGLYETRIDLSKLGGD | |
| CasEnd-354 | MDKKYSIGLDIGTNSVGWAVITDEYKVPSKKFKVLGNTDRHSIKKNLIGALL | 314 |
| | FDSGETAEATRLKRTARRRYTRRKNRICYLQEIFSNEMAKVDPSFFKRLEES | |
| | FLVEEDKSTSRHPIFGNIVEEVAYHEKYPTIYHLRKKLVDSDEKADLRLIYL | |
| | ALAHMIKFRGHFLIEGDLNPDNSDVDKLFIQLVQTYNQLFEENPINASGVDA | |
| | KAILSARLSKSRRLENLIAQLPGEKKNGLFGNLIALSLGLTPNFKSNFDLAE | |
| | DAKLQLSKDTYDDDLDNLLAQIGDQYADLFLAAKNLSDAILLSDILRVDTTD | |
| | TRAPLSASMIKRYDDHHQDLTLLKELVRKYLPEKYKEIFFNQNANGYAGYID | |
| | GGATQEEFYKYIKPILESMPGTKELLEKLENKDLLRKQRTFDNGSIPHQIHL | |
| | GELRAILERQEKFYPFLKENREKIEKILTFRIPYYVGPLARGNSRFAWMTRK | |
| | SEETITPWNFEEVVDKGASAQSFIERMTNFDKNLPNEKVLPKHSLLYEYFTV | |
| | YNELTKVKYVTEGMRKPAFLSGEQKKAIVDLLFKTNRKVTVKQLKEDYFKKI | |
| | ECFDSVEISGVEDRFNASLGTYHDLLKIIKDKDFLDNEENEDILEDIVLTLT | |
| | LFEDREMIEERLKTYAHLFDDKVMKQLKRRRYTGWGRLSRKLINGIRDKQSG | |
| | KTILDFLKSDGFANRNFMQLIHDDSLTFKEDIQKAQVSGQGDSLHEHIANLA | |
| | GSPAIKKGILQTVKVVDELVKVMGRHKPENIVIEMARENQTTQKGQKNSRER | |
| | MKRIEEGIKELGSQILKEHPVENTQLQNEKLYLYYLQNGRDMYVDQELDINR | |
| | LSDYDVDHIVPQSFLKDDSIDNKVLTRSDKARGKSDNVPSEEVVKKMKNYWR | |
| | QLLNAKLITQRKFDNLTKAERGGLSELDKAGFIKRQLVETRQITKHVAQILD | |
| | SRMNTKYDENDKLIREVKVITLKSKLVSDFRKDFQFYKVREINNYHHAHDAY | |
| | LNAVVGTALIKKYPKLESEFVYGDYKVYDVRKMIAKSEQEIGKATAKYFFYS | |
| | NIMNFFKTEITLANGEIRKRPLIETNGETGEIVWDKGRDFATVRKVLSMPQV | |
| | NIVKKTEVQTGGFSKESILPKRDSDKLIARKKDWDPKKYGGFDSPTVAYSVL | |
| | VVAKKEVGKNKELKEVKDLLGITIMERSEFEKDPIGFLKKKGYVDVKEDEII | |
| | KLPKYSLFELGNGRKRMLASAGELQKGNELALPSEYVNFLYLASDYEKLKGK | |
| | EEEKKEKQKYVEENKEYLDKIIEQISEFSRRVIGADANLEKVLEAYKKHKDK | |
| | PIKEQAENIIHLFTLTALGAPAAFKYFDETIDRKRYTSTKEVLDATLIHQSI | |
| | TGLYETRIDLKFLGGD | |
| CasEnd-355 | MDKKYSIGLDIGTNSVGWAVITDEYKVPSKKFKVLGNTDRHSIKKNLIGALL | 315 |
| | FDSGETAEATRLKRTARRRYTRRKNRICYLQEIFSNEMAKVDDSFFHRLEES | |
| | FLVEEDKRGERHPIFGNIVEEVAYHEKYPTIYHLRKHLADSTEKADLRLVYL | |
| | ALAHMIKFRGHFLIEGDLNSENSDVQKLFEQFVETYDQLFEESPLSEETVDA | |
| | KAILTAKLSKSRRLENLIKQFPNEKKNGLFGNLIALSLGLQPNFKSNFELSE | |
| | DAKLQFSKDTYDEDLENLLGQIGDEYADLFLAAKNLYDAILLSGILTVNDES | |
| | TKAPLSASMIKRYDEHHQDLTLLKAFIRKQLPEKYKEIFFDESKNGYAGYID | |
| | GGASQEEFYKYIKPILSKMDGSEYFLEKIEREDFLRKQRTFDNGSIPHQIHL | |
| | QELHAILRRQEEYYPFLKENQEKIEKILTFRIPYYVGPLARGNSRFAWASRK | |
| | SDETITPWNFDEVVDKEASAQAFIERMTNFDKNLPEEKVLPKHSLLYEKFTV | |
| | YNELTKVKYVTEGMGKPQFFDANQKQEIVDLLFKKNRKVTKKKLLEFLFKEF | |
| | EEFRIVDISGVEDRFNASLGTYHDLLKIIKDKDFLDNEENEDILEDIVLTLT | |
| | LFEDREMIEKRLKKYANLFDKKQLKKLKRRRYTGWGRLSKKLINGIRDKQSG | |
| | KTILDYLIDDGFANRNFMQLIHDDSLTFKEEIKKAQVIGDSDSLHEHIANLA | |
| | GSPAIKKGILQTVKVVDELVKVMGRHKPENIVIEMARENQTTQKGQRNSRER | |
| | LKRLEEAIKELGSQILKEHPVENTQLQNDKLYLYYLQNGKDMYTGEELDIDR | |
| | LSDYDVDHIIPQSFIKDDSIDNRVLTSSAKARGKSDNVPSEEVVKKMKSYWR | |
| | RLLNAKLISQRKFDNLTKAERGGLSELDKAGFIKRQLVETRQITKHVAQILD | |
| | SRMNTKYDENDKLIREVKVITLKSKLVSDFRKDFQFYKVREINNYHHAHDAY | |
| | LNAVVGTALIKKYPKLESEFVYGDYKVYDVRKMIAKSEQEIGKATAKYFFYS | |
| | NIMNFFKTEITLANGEIRKRPLIETNGETGEIVWDKGRDFATVRKVLSMPQV | |
| | NIVKKTEVQTGGFSKESILPKRKSDKLIARKKDWDTKKYGGFDSPTVAYSVL | |
| | VVADVEKGKAKKLKTVKELVGITIMERSSFEKNPIAFLEKKGYQNIQEDNII | |
| | KLPKYSLFELENGRKRLLASAGELQKGNELALPAKYVILLYHAKNYEKLKEK | |
| | PEDEEKHLEYVEQHRDEFDEILDQIVEFSERYILADKNLEKIEELYSKNESK | |
| | SIEELASSFINLLTLTALGAPAAFKFLGTDIDRKRYTSTKEILNATLIHQSI | |
| | TGLYETRIDLSKLGGD | |
| CasEnd-356 | MKKPYSIGLDIGTNSVGWAVVTDDYKVPSKKMKVLGNTDRQSIKKNLLGALL | 316 |
| | FDSGETAEATRLKRTARRRYTRRKNRIRYLQEIFAEEMNKVDDSFFHRLEDS | |
| | FLVEEDKRGERHPIFGNIVEEVAYHEKFPTIYHLRKHLADSTEKADLRLVYL | |
| | ALAHIIKFRGHFLIEGDLNTENTDVQKLFKDFLQVYDQTFEDSHLSEETVDA | |
| | ESILTEKISKSRRLENLIKQFPNEKKNGLFGNLIALSLGLQPNFKINFELSE | |
| | DAKLQFSKDTYEEDLENLLGQIGDEYADLFLAAKNLYDAILLSGILTVDDSS | |
| | TKAPLSASMIKRYEEHHEDLTKLKKFIRQNLPEKYKEIFFDESKNGYAGYID | |
| | GGTKQEEFYKYLKNLLSKIDGSEYFLDKIEREDFLRKQRTFDNGSIPHQIHL | |
| | QELHAILRRQEKFYPFLKENQEKIEKILTFRIPYYVGPLARGNSRFAWMSRK | |
| | SDETITPWNFDEVVDKEASAEAFIERMTNNDLYLPNEKVLPKHSLLYEKFTV | |
| | YNELTKVKYVTEGMGKAEFFDANMKQEIFDGLFKKYRKVTKKKLLNFLFKEF | |
| | DEFRIVDISGVEKTFNASLGTYHDLLKILKDKDFLDNEENEKILEDIVLTLT | |
| | LFEDREMIKKRLEKYADLFDKKQLKKLERRHYTGWGRLSAKLINGIRDKQSG | |
| | KTILDYLIDDGNANRNFMQLIHDDNLSFKEEIAKAQVIGETDSLHEIVADLA | |
| | GSPAIKKGILQSLKIVDELVKVMGRHNPENIVVEMARENQTTAKGQRNSRER | |
| | LKRLEEAIKELGSQILKEHPVENSQLQNDRLYLYYLQNGKDMYTGEELDIDK | |
| | LSQYDVDHIIPQSFIKDDSIDNRVLTSSAKARGKSDDVPSEEVVKKMKSFWS | |
| | KLLSAKLISQRKFDNLTKAERGGLTEDDKAGFIKRQLVETRQITKHVAQILD | |
| | ERFNTEFDENNKLIRDVKIITLKSKLVSQFRKEFELYKVREINDYHHAHDAY | |
| | LNAVVGKALIKKYPKLEPEFVYGDYPKYNSYKMIAKSDQERGKATAKMFFYS | |
| | NIMNFFKSDVKLADGTIVVRPQIEVNEETGEIVWDKTKHIATVRKVLSMPQV | |
| | NIVKKTEVQTGGFSKESILPKRESDKLIARKKKWDTKKYGGFDSPTVAYSVL | |
| | VVADIEKGKAKKLKTVKELVGITIMERSRFEKNPVAFLEDKGYQNIQKENII | |
| | KLPKYSLFELENGRKRLLASAGELQKGNELALPAKLVTLLYHAKHIEKLKEK | |
| | PEDKPKHLEYVEEHRDEFKELLDQISEFSKRYILADKNLEKIEELYAKNENA | |
| | SIEELASSFINLLTFTALGAPADFKFFGETIDRKRYTSTKEILNATLIHQSI | |
| | TGLYETRIDLSKLGGD | |
| CasEnd-357 | MDKPYSIGLDIGTNSVGWAVVTDEYKVPSKKFKVLGNTDRKSIKKNLLGALL | 317 |
| | FDSGETAEATRLKRTARRRYTRRKNRICYLQEIFSNEMAKVDDNFFHRLEES | |
| | FLVEEDKRGERHPIFGNIVDEVAYHEKYPTIYHLRKELADSDEKADLRLVYL | |
| | ALAHIIKFRGHFLIEGDLNSENTDVDKLFIQLVQTYNQLFEENPINASGVDA | |
| | KAILSARLSKSRRLENLIAQLPGEKKNGLFGNLIALSLGLTPNFKSNEDLAE | |
| | DAKLQLSKDTYDDDLDNLLAQIGDQYADLFLAAKNLSDAILLSDILRVNTEI | |
| | TKAPLSASMIKRYDEHHQDLTLLKALVRQQLPEKYKEIFFDQSKNGYAGYID | |
| | GGASQEEFYKFIKPILEKMDGTEELLVKLNREDLLRKQRTEDNGSIPHQIHL | |
| | GELHAILRRQEDFYPFLKDNREKIEKILTFRIPYYVGPLARGNSRFAWMTRK | |
| | SEETITPWNFEEVVDKGASAQSFIERMTNFDKNLPNEKVLPKHSLLYEYFTV | |
| | YNELTKVKYVTEGMRKPAFLSGEQKKAIVDLLFKTNRKVTVKQLKEDYFKKI | |
| | ECFDSVEISGVEDRFNASLGTYHDLLKIIKDKDELDNEENEDILEDIVLTLT | |
| | LFEDREMIEERLKTYAHLFDDKVMKQLKRRRYTGWGRLSRKLINGIRDKQSG | |
| | KTILDFLKSDGFANRNFMQLIHDDSLTFKEDIQKAQVSGQGESLHEQIANLA | |
| | GSPAIKKGILQSLKIVDEIVKVMGRYAPENIVVEMARENQTTQKGQKNSRER | |
| | MKRIEEGIKELGSQILKEHPVENTQLQNEKLYLYYLQNGRDMYVDQELDINR | |
| | LSDYDVDHIVPQSFLKDDSIDNKVLTRSDKARGKSDNVPSEEVVKKMKNYWR | |
| | QLLNAKLITQRKFDNLTKAERGGLSELDKAGFIKRQLVETRQITKHVAQILD | |
| | ERFNAEVDDNGKLIRDVKIVTLKSKLVSDFRKDFELYKVREINNYHHAHDAY | |
| | LNAVVGKALIKKYPKLESEFVYGDYKVFDVRKLIGKSDKEIGKATAKYFFYS | |
| | NIMNFFKSDVTLANGTVRKRPIIEVNEETGEIVWDKEKHIATVKKVLSMPQV | |
| | NIVKKTEVQTGGFSKESILPKRDSDKLIARKKDWDTSKYGGFDSPTVAYSVL | |
| | VIADVEKGKAKKLKTVKELVGITIMERSAFEKDPVAFLEDKGYQDIQEILLI | |
| | KLPKYSLFELENGRKRLLASAGELQKGNELALPNHYVTLLYHAKNYEKIKGS | |
| | EEDEKESEIYIEKHREEFDEIFDQIIEFAERYILADANIEKLKELFEKNENA | |
| | SLEELSENFLHLLTFTAFGAPAAFKFFGKDIDRKRYTSPKEILNSTLIHQSI | |
| | TGLYETRIDLSKLGGD | |
| CasEnd-358 | MDKKYSIGLDIGTNSVGWAVITDEYKVPSKKFKVLGNTDRHSIKKNLIGALL | 318 |
| | FDSGETAEATRLKRTARRRYTRRKNRICYLQEIFSNEMAKVDDSFFHRLEES | |
| | FLVEEDKRGERHPIFGNIVDEVAYHEEYPTIYHLRKKLADSTEKADLRLIYL | |
| | ALAHMIKFRGHFLIEGDLNAENTDVQKLFKQLVQVYNKTFEESPLSEITVDA | |
| | KAILTEKLSKSRRLENLIKLFPNEKKNGLFGNLIALSLGLQPNFKKNFELSE | |
| | DAKLQFSKDTYDEDLENLLGQIGDQYADLFLAAKNLYDAILLSGILTVNDES | |
| | TKAPLSASMIKRYDEHHQDLTLLKNFVRQQLPEKYKEIFFDESKNGYAGYID | |
| | GGASQEEFYKYIKPILEKIDGSEYFLDKIEREDFLRKQRTFDNGSIPHQIHL | |
| | GELHAILRRQEEYYPFLKENQEKIEKILTFRIPYYVGPLARGNSRFAWATRK | |
| | SDETITPWNFEEVVDKEASAQAFIERMTNFDKNLPEEKVLPKHSLLYEKFTV | |
| | YNELTKVKYVTEGMGKPEFFDAEQKQEIFDLLFKKYRKVTVKKLLDFLFKEF | |
| | DEFRIVDISGVEDAFNASLGTYHDLLKIIKDKAFLDNEENEKILEDIILTLT | |
| | LFEDREMIEERLSKYADLFDKKVLKKLKRRRYTGWGRLSKKLINGIRDKQSG | |
| | KTILDFLIDDGFANRNFMQLIHDDSLTFKEEIKKAQVIGNTDSLHEHIANLA | |
| | GSPAIKKGILQTVKVVDELVKVMGRHKPENIVIEMARENQTTQKGQKNSRER | |
| | MKRIEEGIKELGSQILKEHPVENTQLQNEKLYLYYLQNGRDMYVDQELDINR | |
| | LSDYDVDHIVPQSFLKDDSIDNKVLTRSDKARGKSDNVPSEEVVKKMKNYWR | |
| | QLLNAKLITQRKFDNLTKAERGGLSELDKAGFIKRQLVETRQITKHVAQILD | |
| | SRMNTKYDENDKLIREVKVITLKSKLVSDFRKDFQFYKVREINNYHHAHDAY | |
| | LNAVVGTALIKKYPKLESEFVYGDYKVYDVRKMIAKSEQEIGKATAKYFFYS | |
| | NIMNFFKTEITLANGEIRKRPLIETNGETGEIVWDKGRDFATVRKVLSMPQV | |
| | NIVKKTEVQTGGFSKESILPKRESDKLIARKKDWDTKKYGGFDSPTVAYSVL | |
| | VVADVEKGKAKKLKTVKELVGITIMERSAFEKNPVAFLEDKGYQNIQEDKII | |
| | KLPKYSLFELENGRKRLLASAGELQKGNELALPQKYVTLLYHAKHYEKLKES | |
| | EEDEEKHLEYVTNHRDEFDEIFDQISEFSERYVLADKNLEKIEELYSKNESY | |
| | SIEELASSFINLLTFTALGAPAAFKFLGKTIDRKRYTSTKEILNSTLIHQSI | |
| | TGLYETRIDLSKLGGD | |
| CasEnd-359 | MDKPYSIGLDIGTNSVGWAVVTDEYKVPSKKFKVLGNTDRKSIKKNLWGVLL | 319 |
| | FDSGETAEATRLKRTARRRYTRRKNRILYLQEIFAEEINKVDENFFHRLEES | |
| | FLVEEDKRGDRHPIFANIVEEVAYHEQYPTIYHLRKHLADNPEKADLRLVYL | |
| | ALAHIIKFRGHFLIEGKEDVENTDIQETFKEFLEIYDNTFEDSELGEEDIDV | |
| | EEILTDKISKSRRVEKVLKLFPTEKKNSIFAEFLKLIVGLTPNFKSHENLEE | |
| | DAKLQFSKDTYEEDLEELLGQIGDEYAEIFVSAKKVYDSILLSGILTVKDSS | |
| | TKAPLSASMVERYDKHHQDLTKLKKFIRKKLPDKYKDIFFDQSKNGYAGYID | |
| | GGAKQEDFYKYLKKLLNKIEGSDYFLEKIEREDFLRKQRTFDNGSIPHQVHL | |
| | QELRAIIRNQAKYYPFLKENQDKIESILTFRIPYYVGPLARGNSRFAWLSRK | |
| | SDETITPWNFDKIIDKEKSAEAFIQRMTNFDKNLPDEKVLPKHSLLYEKFTV | |
| | YNELTKVKYIDERGEEEQFFDANLKQEIFNGVFKKYRKVTKKQLLDYLLKEF | |
| | DELRIVDISGVEDRFNASYGTYHDLKKILGGEEFLDDPKNQEMLEEIIKTLT | |
| | LFEDRKMIKKRLEKYSDILTKEQIKKLSRRRYTGWGRLSAKLLNGIRDKETN | |
| | KTILDYLIDDDNSNRNFMQLIHDDNLSFKDEIAKAQVIDDSESLHEVIANLA | |
| | GSPAIKKGILQSLKIVDEIVKVMGRYAPKNIVVEMARENQTTQKGQKNSRER | |
| | MKRLQEAMKEFGSDLLKEYPTDNTALQNDKLYLYYIQNGKDMYTGEALDIDN | |
| | LSDYDVDHIVPQSFLKDDSIDNRVLVSSKEARGKSDDVPSIDIVRKMKPFWK | |
| | KLLEAKLITQRKYDNLTKVERGSLTELDKAGFIKRQLVETRQITKHVAQILD | |
| | ERFNEEVNDDGKLIRDTKIVTLKSKLVSQFRKEFELYKVREINNYHHAHDAY | |
| | LNAVVAKALIKVYPKLESEFVYGDYPVFDVKKLFKRTDREIGKATQKKFFYS | |
| | NLMNMFKSDVKLADGKVVEKPIVDVNEETGEIAWDKQKHIATIKKVLSMPQV | |
| | NIVKKTEVQTGGFSKESILPKRDSDKLIARKKDWDTEKYGGFDSPTVAYSIL | |
| | VIADIKKGKAKKIKTTKKIIGVTIMERSAFEEDEVAFLESKGYQNIQENNLV | |
| | KIPKYTLFEIENGRKRLLASAGELQKGNELALPQHYITLLYHAKNYEKIKKE | |
| | NSHIAYSLNYVNEHREEFSKLLDQVKEFAQRYTLKDANVEKLKELFEQNEEA | |
| | DLEELAKSFINLLIFTAMGAPAAFKFIGKSIDRKRYTSTKELLNATIIHQSI | |
| | TGLYETRIDLSKLGED | |
| CasEnd-360 | MKKPYSIGLDIGTNSVGWAVVTDDYKVPAKKMKVLGNTDKSHIKKNLLGALL | 320 |
| | FDSGNTAEDRRLKRTARRRYTRRRNRILYLQEIFSEEMGKVDDSFFHRLEDS | |
| | FLVTEDKRGERHPIFGNLEEEVKYHENFPTIYHLRKYLADSPEKADLRLVYL | |
| | ALAHIIKFRGHFLIEGELDTRNNDVQRLFQEFLAVYDNTFENSSLQEQNVQV | |
| | EEILTDKISKSAKKDRVLKLFPNEKSNGRFAEFLKLIVGNQADFKKHFELEE | |
| | KAPLQFSKDTYEEELEVLLAQIGDEYAELFLSAKKLYDSILLSGILTVTDVS | |
| | TKAPLSASMIQRYNEHQMDLTQLKQFIRQKLSDKYNEVESDVSKDGYAGYID | |
| | GKTNQEAFYKYLKKLLNKIEGSGYFLDKIEREDFLRKQRTFDNGSIPHQIHL | |
| | QEMRAIIRRQAEFYPFLAENQDKIEKILTFRIPYYVGPLARGKSDFAWLSRK | |
| | SADKITPWNFDEIVDKESSAEAFINRMTNYDLYLPNQKVLPKHSLLYEKFTV | |
| | YNELTKVKYKTEQMGKTAFFDANMKQEIFDGVFKVYRKVTKDKLMDFLEKEF | |
| | DEFRIVDLTGLDKAFNASLGTYHDLRKILKDKDELDNSKNEKILEDIVLTLT | |
| | LFEDREMIRKRLENYSDLLTKEQVKKLERRHYTGWGRLSAKLIHGIRNKESR | |
| | KTILDYLIDDGNSNRNFMQLINDDALSFKEEIAKAQVIGETDNLNQVVSDIA | |
| | GSPAIKKGILQSLKIVDELVKIMGGHQPENIVVEMARENQFTNQGRRNSQQR | |
| | LKGLTDSIKEFGSQILKEHPVENSQLQNDRLFLYYLQNGRDMYTGEELDIDY | |
| | LSQYDIDHIIPQAFIKDNSIDNRVLTSSKEARGKSDDVPSKDVVRKMKSYWS | |
| | KLLSAKLITQRKFDNLTKAERGGLIDDDKAGFIKRQLVETRQITKHVARILD | |
| | ERFNTETDENNKKIRQVKIVILKSNLVSNFRKEFELYKVREINDYHHAHDAY | |
| | LNAVVGKALLGKYPQLEPEFVYGDYPHENSYKYVRKSDFEENKATAKKFFYS | |
| | NIMNFFKKDVKLADGTIVERPQVERNDENGEIIWDKDKHISNVKKVLSYPQV | |
| | NIVKKVEEQTGGFSKESILPKGNSDKLIPRKTKWDTKKYGGFDSPIVAYSVL | |
| | VIADIEKGKSKKLKTVKALVGITIMEKMTFEKDPVAFLERKGYQNIQEENII | |
| | KLPKYSLFELENGRKRLLASARELQKGNEIVLPNHLVTLLYHAKNIHKVDEK | |
| | QEDQPKHLDYVDKHKDEFKELLDVVSNFSKKYTLAEGNLEKIKELYAQNNSE | |
| | DIKELASSFINLLTFTAIGAPATFKFFDKNIDRKRYTSTTEILNATLIHQSI | |
| | TGLYETRIDLSKLGGD | |

[0176] In some embodiments, the amino acid sequence of the Cas endonuclease (or the functional fragment, functional variant, or domain thereof) comprises or consists of an amino acid sequence at least about 80%, 81%, 82%, 83%, 84%, 85%, 86%, 87%, 88%, 89%, 90%, 91%, 92%, 93%, 94%, 95%, 96%, 97%, 98%, 99%, or 100% identical to the amino acid sequence of any polypeptide set forth in Table 1 or set forth in any one of SEQ ID NOS: 1-320. In some embodiments, the amino acid sequence of the Cas endonuclease (or the functional fragment, functional variant, or domain thereof) comprises or consists of an amino acid sequence at least about 85%, 86%, 87%, 88%, 89%, 90%, 91%, 92%, 93%, 94%, 95%, 96%, 97%, 98%, 99%, or 100% identical to the amino acid sequence of any polypeptide set forth in Table 1 or set forth in any one of SEQ ID NOS: 1-320. In some embodiments, the amino acid sequence of the Cas endonuclease (or the functional fragment, functional variant, or domain thereof) comprises or consists of an amino acid sequence at least about 80%, 90%, 91%, 92%, 93%, 94%, 95%, 96%, 97%, 98%, 99%, or 100% identical to the amino acid sequence of any polypeptide set forth in Table 1 or set forth in any one of SEQ ID NOS: 1-320.

[0177] In some embodiments, the amino acid sequence of the Cas endonuclease (or the functional fragment, functional variant, or domain thereof) comprises or consists of an amino acid sequence at least 80%, 81%, 82%, 83%, 84%, 85%, 86%, 87%, 88%, 89%, 90%, 91%, 92%, 93%, 94%, 95%, 96%, 97%, 98%, 99%, or 100% identical to the amino acid sequence of a polypeptide set forth in Table 1. In some embodiments, the amino acid sequence of the Cas endonuclease (or the functional fragment, functional variant, or domain thereof) comprises or consists of an amino acid sequence at least 85%, 86%, 87%, 88%, 89%, 90%, 91%, 92%, 93%, 94%, 95%, 96%, 97%, 98%, 99%, or 100% identical to the amino acid sequence of a polypeptide set forth in Table 1. In some embodiments, the amino acid sequence of the Cas endonuclease (or the functional fragment, functional variant, or domain thereof) comprises or consists of an amino acid sequence at least 90%, 91%, 92%, 93%, 94%, 95%, 96%, 97%, 98%, 99%, or 100% identical to the amino acid sequence of a polypeptide set forth in Table 1.

[0178] In some embodiments, the amino acid sequence of the Cas endonuclease (or the functional fragment, functional variant, or domain thereof) comprises or consists of the amino acid sequence of a polypeptide set forth in Table 1, and further comprises 1 or more but less than 20% (e.g., less than 15%, less than 12%, less than 10%, less than 8%) amino acid variations (e.g., substitutions, additions, deletions, etc.). In some embodiments, the amino acid sequence of the Cas endonuclease (or the functional fragment, functional variant, or domain thereof) comprises or consists of the amino acid sequence of a polypeptide set forth in Table 1, and further comprises or consists of at least about 1, 2, 3, 4, 5, 6, 7, 8, 9, 10, 20, 30, 40, 50, 60, 70, 80, 90, 100, 150, or 200 amino acid variations (e.g., substitutions, additions, deletions, etc.). In some embodiments, the amino acid sequence of the Cas endonuclease (or the functional fragment, functional variant, or domain thereof) comprises or consists of the amino acid sequence of a polypeptide set forth in Table 1, and further comprises or consists of about 1, 2, 3, 4, 5, 6, 7, 8, 9, 10, 20, 30, 40, 50, 60, 70, 80, 90, 100, 150, or 200 amino acid variations (e.g., substitutions, additions, deletions, etc.). In some embodiments, the amino acid sequence of the Cas endonuclease (or the functional fragment, functional variant, or domain thereof) comprises or consists of the amino acid sequence of a polypeptide set forth in Table 1, and further comprises or consists of no more than about 1, 2, 3, 4, 5, 6, 7, 8, 9, 10, 20, 30, 40, 50, 60, 70, 80, 90, 100, 150, or 200 amino acid variations (e.g., substitutions, additions, deletions, etc.). In some embodiments, the amino acid sequence of the Cas endonuclease (or the functional fragment, functional variant, or domain thereof) comprises or consists of the amino acid sequence of a polypeptide set forth in Table 1, and further comprises or consists of from about 1-200, 1-150, 1-100, 1-90, 1-80, 1-70, 1-60, 1-50, 1-320, 1-30, 1-20, 1-10, 1-5, 10-200, 10-150, 10-100, 10-90, 10-80, 10-70, 10-60, 10-50, 1-040, 10-30, 10-20, 50-200, 50-150, 50-100, 50-90, 50-80, 50-70, or 50-60 amino acid variations (e.g., substitutions, additions, deletions, etc.).

[0179] In some embodiments, the amino acid sequence of the Cas endonuclease (or the functional fragment, functional variant, or domain thereof) comprises or consists of the amino acid sequence of a polypeptide set forth in Table 1, and further comprises 1 or more but less than 20% (e.g., less than 15%, less than 12%, less than 10%, less than 8%) amino acid substitutions. In some embodiments, the amino acid sequence of the Cas endonuclease (or the functional fragment, functional variant, or domain thereof) comprises or consists of the amino acid sequence of a polypeptide set forth in Table 1, and further comprises or consists of at least about 1, 2, 3, 4, 5, 6, 7, 8, 9, 10, 20, 30, 40, 50, 60, 70, 80, 90, 100, 150, or 200 amino acid substitutions. In some embodiments, the amino acid sequence of the Cas endonuclease (or the functional fragment, functional variant, or domain thereof) comprises or consists of the amino acid sequence of a polypeptide set forth in Table 1, and further comprises or consists of about 1, 2, 3, 4, 5, 6, 7, 8, 9, 10, 20, 30, 40, 50, 60, 70, 80, 90, 100, 150, or 200 amino acid substitutions. In some embodiments, the amino acid sequence of the Cas endonuclease (or the functional fragment, functional variant, or domain thereof) comprises or consists of the amino acid sequence of a polypeptide set forth in Table 1, and further comprises or consists of no more than about 1, 2, 3, 4, 5, 6, 7, 8, 9, 10, 20, 30, 40, 50, 60, 70, 80, 90, 100, 150, or 200 amino acid substitutions. In some embodiments, the amino acid sequence of the Cas endonuclease (or the functional fragment, functional variant, or domain thereof) comprises or consists of the amino acid sequence of a polypeptide set forth in Table 1, and further comprises or consists of from about 1-200, 1-150, 1-100, 1-90, 1-80, 1-70, 1-60, 1-50, 1-320, 1-30, 1-20, 1-10, 1-5, 10-200, 10-150, 10-100, 10-90, 10-80, 10-70, 10-60, 10-50, 1-040, 10-30, 10-20, 50-200, 50-150, 50-100, 50-90, 50-80, 50-70, or 50-60 amino acid substitutions.

[0180] In some embodiments, the amino acid sequence of the Cas endonuclease (or the functional fragment, functional variant, or domain thereof) comprises or consists of an amino acid sequence at least 80%, 81%, 82%, 83%, 84%, 85%, 86%, 87%, 88%, 89%, 90%, 91%, 92%, 93%, 94%, 95%, 96%, 97%, 98%, 99%, or 100% identical to the amino acid sequence of any one of SEQ ID NOS: 1-320. In some embodiments, the amino acid sequence of Cas endonuclease (or the functional fragment, functional variant, or domain thereof) comprises or consists of an amino acid sequence at least 85%, 86%, 87%, 88%, 89%, 90%, 91%, 92%, 93%, 94%, 95%, 96%, 97%, 98%, 99%, or 100% identical to the amino acid sequence of any one of SEQ ID NOS: 1-320. In some embodiments, the amino acid sequence of Cas endonuclease (or the functional fragment, functional variant, or domain thereof) comprises or consists of an amino acid sequence at least 90%, 91%, 92%, 93%, 94%, 95%, 96%, 97%, 98%, 99%, or 100% identical to the amino acid sequence of any one of SEQ ID NOS: 1-320.

[0181] In some embodiments, the amino acid sequence of the Cas endonuclease (or the functional fragment, functional variant, or domain thereof) comprises or consists of the amino acid sequence of any one of SEQ ID NOS: 1-320, and further comprises 1 or more but less than 20% (e.g., less than 15%, less than 12%, less than 10%, less than 8%) amino acid variations (e.g., substitutions, additions, deletions, etc.). In some embodiments, the amino acid sequence of the Cas endonuclease (or the functional fragment, functional variant, or domain thereof) comprises or consists of the amino acid sequence of any one of SEQ ID NOS: 1-320, and further comprises or consists of at least about 1, 2, 3, 4, 5, 6, 7, 8, 9, 10, 20, 30, 40, 50, 60, 70, 80, 90, 100, 150, or 200 amino acid variations (e.g., substitutions, additions, deletions, etc.). In some embodiments, the amino acid sequence of the Cas endonuclease (or the functional fragment, functional variant, or domain thereof) comprises or consists of the amino acid sequence of any one of SEQ ID NOS: 1-320, and further comprises or consists of about 1, 2, 3, 4, 5, 6, 7, 8, 9, 10, 20, 30, 40, 50, 60, 70, 80, 90, 100, 150, or 200 amino acid variations (e.g., substitutions, additions, deletions, etc.). In some embodiments, the amino acid sequence of the Cas endonuclease (or the functional fragment, functional variant, or domain thereof) comprises or consists of the amino acid sequence of any one of SEQ ID NOS: 1-320, and further comprises or consists of no more than about 1, 2, 3, 4, 5, 6, 7, 8, 9, 10, 20, 30, 40, 50, 60, 70, 80, 90, 100, 150, or 200 amino acid variations (e.g., substitutions, additions, deletions, etc.). In some embodiments, the amino acid sequence of the Cas endonuclease (or the functional fragment, functional variant, or domain thereof) comprises or consists of the amino acid sequence of any one of SEQ ID NOS: 1-320, and further comprises or consists of from about 1-200, 1-150, 1-100, 1-90, 1-80, 1-70, 1-60, 1-50, 1-320, 1-30, 1-20, 1-10, 1-5, 10-200, 10-150, 10-100, 10-90, 10-80, 10-70, 10-60, 10-50, 1-040, 10-30, 10-20, 50-200, 50-150, 50-100, 50-90, 50-80, 50-70, or 50-60 amino acid variations (e.g., substitutions, additions, deletions, etc.).

[0182] In some embodiments, the amino acid sequence of the Cas endonuclease (or the functional fragment, functional variant, or domain thereof) comprises or consists of the amino acid sequence of any one of SEQ ID NOS: 1-320, and further comprises 1 or more but less than 15% (less than 12%, less than 10%, less than 8%), amino acid substitutions. In some embodiments, the amino acid sequence of the Cas endonuclease (or the functional fragment, functional variant, or domain thereof) comprises or consists of the amino acid sequence of any one of SEQ ID NOS: 1-320, and further comprises or consists of at least about 1, 2, 3, 4, 5, 6, 7, 8, 9, 10, 20, 30, 40, 50, 60, 70, 80, 90, 100, 150, or 200 amino acid substitutions. In some embodiments, the amino acid sequence of the Cas endonuclease (or the functional fragment, functional variant, or domain thereof) comprises or consists of the amino acid sequence of any one of SEQ ID NOS: 1-320, and further comprises or consists of about 1, 2, 3, 4, 5, 6, 7, 8, 9, 10, 20, 30, 40, 50, 60, 70, 80, 90, 100, 150, or 200 amino acid substitutions. In some embodiments, the amino acid sequence of the Cas endonuclease (or the functional fragment, functional variant, or domain thereof) comprises or consists of the amino acid sequence of any one of SEQ ID NOS: 1-320, and further comprises or consists of no more than about 1, 2, 3, 4, 5, 6, 7, 8, 9, 10, 20, 30, 40, 50, 60, 70, 80, 90, 100, 150, or 200 amino acid substitutions. In some embodiments, the amino acid sequence of the Cas endonuclease (or the functional fragment, functional variant, or domain thereof) comprises or consists of the amino acid sequence of any one of SEQ ID NOS: 1-320, and further comprises or consists of from about 1-200, 1-150, 1-100, 1-90, 1-80, 1-70, 1-60, 1-50, 1-320, 1-30, 1-20, 1-10, 1-5, 10-200, 10-150, 10-100, 10-90, 10-80, 10-70, 10-60, 10-50, 1-040, 10-30, 10-20, 50-200, 50-150, 50-100, 50-90, 50-80, 50-70, or 50-60 amino acid substitutions.

[0183] In some embodiments, the amino acid sequence of the Cas endonuclease is less than about 90%, 89%, 88%, 87%, 86%, 85%, 84%, 83%, 82%, 81%, 80%, 79%, 78%, 77%, 76%, 75%, 74%, 73%, 72%, 71%, 70%, 69%, 68%, 67%, 66%, 65%, 64%, 63%, 62%, 61%, 60%, 59%, 58%, 57%, 56%, 55%, 54%, 53%, 52%, 51%, or 50% identical to the amino acid sequence of a reference Cas endonuclease (e.g., a reference naturally occurring Cas endonuclease). In some embodiments, the amino acid sequence of the Cas endonuclease is less than 90% (e.g., less than 89%, 88%, 87%, 86%, 85%, 84%, 83%, 82%, 81%, 80%, 79%, 78%, 77%, 76%, 75%) and greater than 50% 51%, 52%, 53%, 54%, 55%, 56%, 57%, 58%, 59%, 60%, 61%, 62%, 63%, 64%, 65%, 66%, 67%, 68%, 69%, 70%, 71%, 72%, 73%, 74%, 75%, 76%, 77%, 78%, 79%, 80%, 81%, 82%, 83%, 84%, 85%, 86%, 87%, 88%, 89% identical to the amino acid sequence of a reference Cas endonuclease (e.g., a reference naturally occurring Cas endonuclease). In some embodiments, the amino acid sequence of the Cas endonuclease is less than about 90%, 89%, 88%, 87%, 86%, 85%, 84%, 83%, 82%, 81%, 80%, 79%, 78%, 77%, 76%, 75%, 74%, 73%, 72%, 71%, 70%, 69%, 68%, 67%, 66%, 65%, 64%, 63%, 62%, 61%, 60%, 59%, 58%, 57%, 56%, 55%, 54%, 53%, 52%, 51%, or 50% identical to the amino acid sequence of a reference Cas9 endonuclease. In some embodiments, the amino acid sequence of the Cas endonuclease is less than 90% (e.g., less than 89%, 88%, 87%, 86%, 85%, 84%, 83%, 82%, 81%, 80%, 79%, 78%, 77%, 76%, 75%) and greater than 50% 51%, 52%, 53%, 54%, 55%, 56%, 57%, 58%, 59%, 60%, 61%, 62%, 63%, 64%, 65%, 66%, 67%, 68%, 69%, 70%, 71%, 72%, 73%, 74%, 75%, 76%, 77%, 78%, 79%, 80%, 81%, 82%, 83%, 84%, 85%, 86%, 87%, 88%, 89% identical to the amino acid sequence of a reference Cas9 endonuclease. In some embodiments, the amino acid sequence of the Cas endonuclease is less than about 90%, 89%, 88%, 87%, 86%, 85%, 84%, 83%, 82%, 81%, 80%, 79%, 78%, 77%, 76%, 75%, 74%, 73%, 72%, 71%, 70%, 69%, 68%, 67%, 66%, 65%, 64%, 63%, 62%, 61%, 60%, 59%, 58%, 57%, 56%, 55%, 54%, 53%, 52%, 51%, or 50% identical to the amino acid sequence of a reference Cas9 endonuclease comprising the amino acid sequence set forth in SEQ ID NO: 321. In some embodiments, the amino acid sequence of the Cas endonuclease is less than 90% (e.g., less than 89%, 88%, 87%, 86%, 85%, 84%, 83%, 82%, 81%, 80%, 79%, 78%, 77%, 76%, 75%) and greater than 50% 51%, 52%, 53%, 54%, 55%, 56%, 57%, 58%, 59%, 60%, 61%, 62%, 63%, 64%, 65%, 66%, 67%, 68%, 69%, 70%, 71%, 72%, 73%, 74%, 75%, 76%, 77%, 78%, 79%, 80%, 81%, 82%, 83%, 84%, 85%, 86%, 87%, 88%, 89% identical to the amino acid sequence of a reference Cas9 endonuclease comprising the amino acid sequence set forth in SEQ ID NO: 321.

### 4.2.1 Activity of Cas Endonucleases

[0184] The Cas endonucleases described herein can have multiple functions, have domains of different function, etc. In some embodiments, the Cas endonuclease exhibits (or is engineered to exhibit) more than one (e.g., two, there, four, five, or more) different functions (e.g., described herein). In some embodiments, the Cas endonuclease does not exhibit (or is engineered to not exhibit) one or more (e.g., two, there, four, five, or more) different functions (e.g., described herein). Exemplary functions, include, but are not limited to, endonuclease activity (e.g., introduction of double and/or single strand breaks in nucleic acid sequences), RNA (e.g., gRNA) binding activity, target nucleic acid (e.g., DNA) molecule binding activity, and target nucleic acid molecule editing activity (e.g., when provided as part of a suitable system (e.g., a system described herein).

### 4.2.1.1 Endonuclease Activity

[0185] In some embodiments, the Cas endonuclease (or a functional fragment, functional variant, or domain thereof) (or a conjugate or fusion protein comprising any of the foregoing) comprises any one or more (e.g., 1, 2, 3, 4, 5, 6, or more) of the following properties (or is engineered to have one or more of the following properties): (a) DNA endonuclease activity; (b) RNA endonuclease activity; (c) DNA/RNA hybrid endonuclease activity; (d) RNA guided DNA endonuclease activity; (e) DNA guided DNA endonuclease activity; (f) RNA guided RNA endonuclease activity; (g) DNA guided RNA endonuclease activity; (h) the ability to mediate double strand breaks in a target double stranded nucleic acid (e.g., DNA) molecule; (i) the ability to mediate single strand breaks in a target double stranded nucleic acid (e.g., DNA) molecule; (j) the inability to mediate double strand breaks in a target double stranded nucleic acid (e.g., DNA) molecule; and/or (k) the ability to mediate single strand breaks in a target double stranded nucleic acid (e.g., DNA) molecule and the inability to mediate double strand breaks in a target double stranded nucleic acid (e.g., DNA) molecule (i.e., nickase activity).

[0186] In some embodiments, the Cas endonuclease (or a functional fragment, functional variant, or domain thereof) (or a conjugate or fusion protein comprising any of the foregoing) exhibits (or is engineered to exhibit) the ability to mediate double strand breaks in a target double stranded nucleic acid (e.g., DNA) molecule. In some embodiments, the Cas endonuclease (or a functional fragment, functional variant, or domain thereof) (or a conjugate or fusion protein comprising any of the foregoing) exhibits (or is engineered to exhibit) the ability to mediate single strand breaks in a target double stranded nucleic acid (e.g., DNA) molecule.

[0187] In some embodiments, the Cas endonuclease (or a functional fragment, functional variant, or domain thereof) (or a conjugate or fusion protein comprising any of the foregoing) exhibits (or is engineered to exhibit) the ability to mediate single strand breaks in a target double stranded nucleic acid (e.g., DNA) molecule and the inability to mediate double strand breaks in a target double stranded nucleic acid (e.g., DNA) molecule (i.e., nickase activity). In some embodiments, the Cas endonuclease (or a functional fragment, functional variant, or domain thereof) (or a conjugate or fusion protein comprising any of the foregoing) is capable of (or is engineered to be capable of) mediating single strand breaks at a higher frequency than double stranded breaks in a target double stranded nucleic acid (e.g., DNA) molecule. In some embodiments, the Cas endonuclease (or a functional fragment, functional variant, or domain thereof) (or a conjugate or fusion protein comprising any of the foregoing) is capable of (or is engineered to be capable of) mediating single strand breaks at a higher frequency than double stranded breaks in a target double stranded nucleic acid (e.g., DNA) molecule (e.g., at least 90%, 95%, 96%, 97%, 98%, or 99% of the breaks in a target double stranded nucleic acid (e.g., DNA) molecule are single stranded breaks; or less than 10%, 5%, 4%, 3%, 2%, or 1% of the breaks in a target double stranded nucleic acid (e.g., DNA) molecule are double stranded breaks). In some embodiments, the Cas endonuclease (or a functional fragment, functional variant, or domain thereof) (or a conjugate or fusion protein comprising any of the foregoing) mediates (or is engineered to mediate) substantially no double strand breaks in target double stranded nucleic acid (e.g., DNA) molecules. In some embodiments, the Cas endonuclease (or a functional fragment, functional variant, or domain thereof) (or a conjugate or fusion protein comprising any of the foregoing) mediates (or is engineered to mediate) no detectable double strand breaks in target double stranded nucleic acid (e.g., DNA) molecules.

4.2.1.2 gRNA Binding Activity

[0188] In some embodiments, the Cas endonuclease comprises a nucleic acid molecule binding domain. In some embodiments, the Cas endonuclease comprises a DNA binding domain. In some embodiments, the Cas endonuclease comprises an RNA binding domain. In some embodiments, the Cas endonuclease comprises a gRNA binding domain. In some embodiments, the Cas endonuclease is capable of binding a gRNA described herein. In some embodiments, the endonuclease is capable of binding a crRNA. In some embodiments, the Cas endonuclease is capable of binding a crRNA that is part of a template RNA or a sgRNA. Without wishing to be bound by theory, it is thought that the binding of the Cas endonuclease to the crRNA (e.g., a crRNA of a template RNA or a sgRNA) facilitates targeting of the Cas endonuclease to the target nucleic acid molecule (through coordination with a tracrRNA (e.g., the tracr RNA of a template RNA or a sgRNA)).

### 4.2.1.3 Target Nucleic Acid Molecule Binding Activity

[0189] In some embodiments, the Cas endonuclease comprises a domain that is capable of binding a target nucleic acid molecule (e.g., a target double stranded nucleic acid molecule (e.g., a target dsDNA molecule)). In some embodiments, the Cas endonuclease recognizes a PAM in the target nucleic acid molecule (e.g., a target double stranded nucleic acid molecule (e.g., a target dsDNA molecule)). In some embodiments, the Cas endonuclease requires a PAM to be present in or adjacent to a target site in a target nucleic acid molecule (e.g., a target double stranded nucleic acid molecule (e.g., a target dsDNA molecule)) in order to mediate cleavage of the nucleic acid molecule. In some embodiments, the PAM sequence comprises or consists of NGG.

### 4.2.1.4 Target Nucleic Acid Editing Activity

[0190] In some embodiments, when provided within a suitable system (e.g., a system described herein (see, e.g., § 4.5)), the Cas endonuclease can mediate editing (e.g., the addition, deletion, substitution, etc.) of the nucleotide sequence of a target nucleic acid molecule. In some embodiments, the Cas endonuclease exhibits increased editing efficiency relative to the editing efficiency of a reference Cas endonuclease (e.g., when provided in a suitable system (e.g., a system described herein). In some embodiments, the Cas endonuclease exhibits at least about a 30%, 35%, 40%, 45%, 50%, 55%, 60%, 65%, 70%, 75%, 80%, 85%, 90%, 95%, 100%, 110%, 120%, 130%, 140%, 150%, 160%, 170%, 180%, 190%, 200%, or more increase in editing efficiency relative to the editing efficiency of a reference Cas endonuclease (e.g., when provided in a suitable system (e.g., a system described herein). In some embodiments, the Cas endonuclease exhibits at least about a 50%, 55%, 60%, 65%, 70%, 75%, 80%, 85%, 90%, 95%, 100%, or more increase in editing efficiency relative to the editing efficiency of a reference Cas endonuclease (e.g., when provided in a suitable system (e.g., a system described herein). In some embodiments, the Cas endonuclease exhibits an increase from about 30%-200%, 40%-200%, 50%-200%, 60%-200%, 70%-200%, 80%-200%, 90%-200%, 100%-200%, 150%-200%, 30%-150%, 40%-150%, 50%-150%, 60%-150%, 70%-150%, 80%-150%, 90%-150%, 100%-150%, 30%-100%, 40%-100%, 50%-100%, 60%-100%, 70%-100%, 80%-100%, or 90%-100%, or more increase in editing efficiency relative to the editing efficiency of a reference Cas endonuclease (e.g., when provided in a suitable system (e.g., a system described herein).

[0191] In some embodiments, the Cas endonuclease exhibits increased editing efficiency relative to the editing efficiency of a reference Cas endonuclease set forth in SEQ ID NO: 321 (e.g., when provided in a suitable system (e.g., a system described herein). In some embodiments, the Cas endonuclease exhibits at least about a 30%, 35%, 40%, 45%, 50%, 55%, 60%, 65%, 70%, 75%, 80%, 85%, 90%, 95%, 100%, 110%, 120%, 130%, 140%, 150%, 160%, 170%, 180%, 190%, 200%, or more increase in editing efficiency relative to the editing efficiency of the reference Cas endonuclease set forth in SEQ ID NO: 321 (e.g., when provided in a suitable system (e.g., a system described herein). In some embodiments, the Cas endonuclease exhibits at least about a 50%, 55%, 60%, 65%, 70%, 75%, 80%, 85%, 90%, 95%, 100%, or more increase in editing efficiency relative to the editing efficiency of the reference Cas endonuclease set forth in SEQ ID NO: 321 (e.g., when provided in a suitable system (e.g., a system described herein). In some embodiments, the Cas endonuclease exhibits an increase from about 30%-200%, 40%-200%, 50%-200%, 60%-200%, 70%-200%, 80%-200%, 90%-200%, 100%-200%, 150%-200%, 30%-150%, 40%-150%, 50%-150%, 60%-150%, 70%-150%, 80%-150%, 90%-150%, 100%-150%, 30%-100%, 40%-100%, 50%-100%, 60%-100%, 70%-100%, 80%-100%, or 90%-100%, or more increase in editing efficiency relative to the editing efficiency of the reference Cas endonuclease set forth in SEQ ID NO: 321 (e.g., when provided in a suitable system (e.g., a system described herein).

### 4.2.1.5 Alteration of Activity

[0192] In some embodiments, the amino acid sequence of the Cas endonuclease (or a functional fragment, functional variant, or domain thereof) comprises or consists of the amino acid sequence of any Cas endonuclease set forth in Table 1 or set forth in any one of SEQ ID NOS: 1-320, and further comprises 1 or more amino acid variation (e.g., substitution, deletion, addition), wherein the one or more amino acid variation (e.g., substitution, deletion, addition) alters an activity of the Cas endonuclease (e.g., an activity described herein (e.g., induction of double strand breaks, nickase activity, gRNA binding activity, target nucleic acid binding activity, PAM recognition, etc.)). In some embodiments, the amino acid sequence of the Cas endonuclease (or a functional fragment, functional variant, or domain thereof) comprises or consists of the amino acid sequence of any Cas endonuclease set forth in Table 1 or set forth in any one of SEQ ID NOS: 1-320, and further comprises 1 or more amino acid variation (e.g., substitution, deletion, addition) but not more than 20%, not more than 15%, not more than 12%, no more than 10%, no more than 8% amino acid variation (e.g., substitution, deletion, addition), wherein the one or more amino acid variation (e.g., substitution, deletion, addition) alters an activity of the Cas endonuclease (e.g., an activity described herein (e.g., induction of double strand breaks, nickase activity, gRNA binding activity, target nucleic acid binding activity, PAM recognition, etc.)).

[0193] In some embodiments, the one or more amino acid variation (e.g., substitution, deletion, addition) reduces or eliminates the ability of the Cas endonuclease to mediate double strand breaks in a target double stranded nucleic acid (e.g., DNA) molecule. In some embodiments, a Cas endonuclease comprising the one or more amino acid variation (e.g., substitution, deletion, addition) has the ability to mediate single strand breaks in a target double stranded nucleic acid (e.g., DNA) molecule) and does not have the ability to mediate double strand breaks in a target double stranded nucleic acid (e.g., DNA) molecule. In some embodiments, the one or more amino acid variation (e.g., substitution, deletion, addition) alters the PAM nucleotide sequence recognized by the Cas endonuclease. In some embodiments, the one or more amino acid variation (e.g., substitution, deletion, addition) reduces the endonuclease activity of the Cas endonuclease by at least 10%, 15%, 20%, 25%, 30%, 35%, 40%, 45%, 50%, 55%, 60%, 65%, 70%, 75%, 80%, 85%, 90%, 95%, 96%, 97%, 98%, 99% or 100% relative to the endonuclease lacking the one or more amino acid variation (e.g., substitution, deletion, addition). In some embodiments, the one or more amino acid variation (e.g., substitution, deletion, addition) enhances the Cas endonuclease activity of the endonuclease by at least 1-fold, 2-fold, 5-fold, 10-fold, or 100-fold relative to the Cas endonuclease lacking the one or more amino acid variation (e.g., substitution, deletion, addition).

### 4.3 Cas Endonuclease Fusion Proteins & Conjugates

[0194] In some embodiments, a Cas endonuclease (or a functional fragment, functional variant, or domain thereof) described herein (or a nucleic acid molecule encoding a Cas endonuclease (or a functional fragment, functional variant, or domain thereof) described herein) is operably connected to a heterologous moiety (e.g., a heterologous protein (e.g., or a functional fragment, functional variant, or domain thereof)). As such, further provided herein are, inter alia, fusion proteins comprising a Cas endonuclease (e.g., described herein) (or a functional fragment, functional variant, or domain thereof) and one or more heterologous protein (or a functional fragment, functional variant, or domain thereof). Further provided herein are, inter alia, conjugates comprising a Cas endonuclease (e.g., described herein) (or a functional fragment, functional variant, or domain thereof) (or a nucleic acid molecule encoding a Cas endonuclease (or a functional fragment, functional variant, or domain thereof) described herein) and one or more heterologous moiety.

[0195] Heterologous moieties include, but are not limited to, proteins, peptides, small molecules, nucleic acid molecules (e.g., DNA, RNA, DNA/RNA hybrid molecules), carbohydrates, lipids, and polymers (e.g., synthetic polymers).

[0196] In some embodiments, the endonuclease (or a functional fragment, functional variant, or domain thereof) is operably connected to at least 1, 2, 3, 4, 5, 6, 7, 8, 9, or 10, or more heterologous moieties. In some embodiments, the endonuclease (or a functional fragment, functional variant, or domain thereof) is operably connected to 1, 2, 3, 4, 5, 6, 7, 8, 9, or 10, but no more than 10 heterologous moieties. In some embodiments, the endonuclease (or a functional fragment, functional variant, or domain thereof) is operably connected to no more than 1, 2, 3, 4, 5, 6, 7, 8, 9, or 10, heterologous moieties. In some embodiments, the endonuclease (or the functional fragment or functional variant thereof) is operably connected to from about 1-10, 1-9, 1-8, 1-7, 1-6, 1-5, 1-4, 1-3, or 1-2 heterologous moieties. In some embodiments, the endonuclease (or a functional fragment, functional variant, or domain thereof) is operably connected to about 1, 2, 3, 4, 5, 6, 7, 8, 9, or 10, heterologous moieties.

### 4.3.1 Heterologous Proteins

[0197] In some embodiments, the heterologous moiety is a protein. As such, as described above, provided herein are fusion proteins comprising a Cas endonuclease (e.g., described herein) (or a functional fragment, functional variant, or domain thereof) and one or more heterologous protein. It is clear from the disclosure, but for the sake of clarity, it is to be understood that the use of the term “heterologous protein” (e.g., any heterologous protein described herein) includes a full-length protein, as well as e.g., functional fragments, functional variants, and domains of the full-length protein.

[0198] In some embodiments, the fusion protein comprises more than one heterologous protein. In some embodiments, the fusion protein comprises a plurality of heterologous proteins. In some embodiments, the Cas endonuclease (or a functional fragment, functional variant, or domain thereof) is operably connected to at least 1, 2, 3, 4, 5, 6, 7, 8, 9, or 10, or more heterologous proteins. In some embodiments, the Cas endonuclease (or a functional fragment, functional variant, or domain thereof) is operably connected to at least 1, 2, 3, 4, 5, 6, 7, 8, 9, or 10, but no more than 10 heterologous proteins. In some embodiments, the Cas endonuclease (or a functional fragment, functional variant, or domain thereof) is operably connected to no more than 1, 2, 3, 4, 5, 6, 7, 8, 9, or 10, heterologous proteins. In some embodiments, the Cas endonuclease (or a functional fragment, functional variant, or domain thereof) is operably connected to from about 1-10, 1-9, 1-8, 1-7, 1-6, 1-5, 1-4, 1-3, or 1-2 heterologous proteins (or a functional fragment, functional variant, or domain thereof). In some embodiments, the Cas endonuclease (or a functional fragment, functional variant, or domain thereof) is operably connected to about 1, 2, 3, 4, 5, 6, 7, 8, 9, or 10, heterologous proteins.

[0199] Exemplary heterologous proteins include, but are not limited to, cellular localization signals (e.g., nuclear localization signal peptides, nuclear export signal peptides); detectable proteins (e.g., fluorescent proteins, protein tags (e.g., FLAG tags, HIS tags, HA tags), reporter genes); and enzymes. In some embodiments, the heterologous protein is an enzyme. In some embodiments, the heterologous protein exhibits enzymatic activity.

[0200] In some embodiments, the heterologous protein exhibits one or more of polymerase activity (e.g., reverse transcriptase activity), nucleobase editing activity (e.g., deaminase activity), enzymatic activity, epigenetic modifying activity, nucleic acid cleavage activity, nucleic acid binding activity, transcription modulation activity, methyltransferase activity, demethylase activity (e.g., histone demethylase activity), acetyltransferase activity, deacetylase activity, kinase activity, phosphatase activity, ubiquitin ligase activity, deubiquitinating activity, adenylation activity, deadenylation activity, SUMOylating activity, deSUMOylating activity, ribosylation activity, deribosylation activity, myristoylation activity, demyristoylation activity, integrase activity, transposase activity, recombinase activity, ligase activity, helicase activity, or nuclease activity.

[0201] In some embodiments, the heterologous protein exhibits polymerase (e.g., reverse transcriptase) activity, nucleobase modifying activity (e.g., deaminase activity), methylase activity, demethylase activity, transcription activation activity, transcription repression activity, transcription release factor activity, histone modification activity, nuclease activity, single-strand RNA cleavage activity, double-strand RNA cleavage activity, single-strand DNA cleavage activity, or double-strand DNA cleavage activity and nucleic acid binding activity, or any combination of the foregoing.

[0202] In some embodiments, the heterologous protein is a polymerase (e.g., a reverse transcriptase), a nucleobase editor (e.g., a deaminase), a methyltransferase, a demethylase (e.g., a histone demethylase), an acetyltransferase, a deacetylase, a kinase, a phosphatase, a ubiquitin ligase, a deubiquitinase, an adenylase, a deadenylase, a SUMOylase, a deSUMOylase, a ribosylase, a deribosylase, a myristoylase, a demyristoylase, an integrase, a transposase, a recombinase, a ligase, a helicase, or a nuclease, or a functional fragment, functional variant, or domain of the any of the foregoing.

### 4.3.1.1 Polymerases (e.g., Reverse Transcriptases (RTs))

[0203] In some embodiments, the heterologous protein exhibits polymerase (e.g., reverse transcriptase) activity. In some embodiments, the heterologous protein exhibits RNA-dependent DNA polymerase activity. In some embodiments, the heterologous protein exhibits reverse transcriptase activity.

[0204] In some embodiments, the heterologous protein is a polymerase (or a functional fragment, functional variant, or domain thereof). In some embodiments, the polymerase comprises or consists of the catalytic (e.g., polymerase (e.g., reverse transcriptase)) domain of a polymerase (e.g., a polymerase described herein (e.g., a reverse transcriptase (RT) (e.g., described herein))). In some embodiments, the polymerase comprises or consists of the catalytic (e.g., polymerase (e.g., reverse transcriptase)) domain of a polymerase (e.g., a polymerase described herein (e.g., a RT (e.g., described herein))) and the nucleic acid (e.g., RNA, DNA) binding domain of the polymerase. In some embodiments, the polymerase comprises or consists of the catalytic (e.g., polymerase (e.g., reverse transcriptase)) domain of a RT (e.g., described herein). In some embodiments, the polymerase comprises or consists of the catalytic (e.g., polymerase (e.g., reverse transcriptase)) domain of a RT (e.g., described herein) and the RNA binding domain of the RT.

[0205] In some embodiments, the polymerase comprises an RNase H domain of a RT (e.g., a RT described herein). In some embodiments, the polymerase does not contain an RNase H domain of a RT (e.g., a RT described herein). In some embodiments, the polymerase comprises a DNA dependent DNA polymerase domain of a RT (e.g., a RT described herein). In some embodiments, the polymerase does not contain a DNA dependent DNA polymerase domain of a RT (e.g., a RT described herein). In some embodiments, the DNA dependent DNA polymerase domain is the same domain as the reverse transcriptase domain (i.e., the domain has both reverse transcriptase and DNA dependent DNA polymerase activity). In some embodiments, the DNA dependent DNA polymerase domain is not the same domain as the reverse transcriptase domain.

[0206] In some embodiments, the polymerase comprises or consists of the reverse transcriptase domain of a RT (e.g., described herein), the RNA binding domain of the RT, and the RNase H domain of the RT. In some embodiments, the polymerase comprises or consists of the reverse transcriptase domain of a RT (e.g., described herein) and the RNA binding domain of the RT, and does not contain an RNase H domain of the RT. In some embodiments, the polymerase comprises or consists of the reverse transcriptase domain of a RT (e.g., described herein), the RNA binding domain of the RT, the RNase H domain of the RT, and DNA dependent DNA polymerase domain of a RT. In some embodiments, the polymerase comprises or consists of the reverse transcriptase domain of the RT (e.g., described herein), the RNA binding domain of the RT, and the RNase H domain of the RT, and does not contain a DNA dependent DNA polymerase domain of a RT.

[0207] In some embodiments, the polymerase is a RT (or a functional fragment, functional variant, or domain thereof). In some embodiments, the RT comprises or consists of the reverse transcriptase domain of a RT (e.g., described herein). In some embodiments, the RT comprises the RNA binding domain of the RT. In some embodiments, the RT comprises or consists of an RNase domain of a RT (e.g., described herein). In some embodiments, the RT does not contain an RNase domain of a RT (e.g., described herein). In some embodiments, the RT comprises a DNA dependent DNA polymerase domain of a RT (e.g., described herein). In some embodiments, the RT does not contain a DNA dependent DNA polymerase domain of a RT (e.g., described herein). In some embodiments, the DNA dependent DNA polymerase domain is the same domain as the reverse transcriptase domain (i.e., the domain has both reverse transcriptase and DNA dependent DNA polymerase activity). In some embodiments, the DNA dependent DNA polymerase domain is not the same domain as the reverse transcriptase domain.

[0208] In some embodiments, the RT comprises or consists of the reverse transcriptase domain of a RT (e.g., described herein) and the RNA binding domain of the RT. In some embodiments, the RT comprises the reverse transcriptase domain of a RT (e.g., described herein), the RNA binding domain of the RT, and the RNase domain of the RT. In some embodiments, the RT comprises the reverse transcriptase domain of a RT (e.g., described herein) and the RNA binding domain of the RT, and does not contain the RNase domain of the RT. In some embodiments, the RT comprises the reverse transcriptase domain of a RT (e.g., described herein), the RNA binding domain of the RT, the RNase domain of the RT, and the DNA dependent DNA polymerase domain of the RT. In some embodiments, the RT comprises the reverse transcriptase domain of a RT (e.g., described herein), the RNA binding domain of the RT, the RNase domain of the RT, and does not contain the DNA dependent DNA polymerase domain of the RT. In some embodiments, the RT comprises the reverse transcriptase domain of a RT (e.g., described herein) and the RNA binding domain of the RT, and does not contain the RNase domain of the RT and the DNA dependent DNA polymerase domain of the RT.

[0209] Any of the foregoing domains (e.g., reverse transcriptase domain, RNA binding domain, RNase domain, DNA dependent DNA polymerase domain) may be derived from the same or different polymerase (e.g., reverse transcriptase). Any of the foregoing domains (e.g., reverse transcriptase domain, RNA binding domain, RNase domain, DNA dependent DNA polymerase domain) may be derived from a naturally occurring reverse polymerase (e.g., reverse transcriptase) or varied (e.g., as defined herein) (e.g., comprising one or more amino acid variation) from a naturally occurring polymerase (e.g., reverse transcriptase). In some embodiments, the RT comprises a domain from more than one RT.

[0210] In some embodiments, the RT (or the functional fragment, functional variant, or domain thereof (e.g., the reverse transcriptase domain)) comprises a region that specifically recognizes a substrate RNA. For example, in some embodiments, the RT (or the functional fragment, functional variant, or domain thereof (e.g., the reverse transcriptase domain)) comprises a UTR (e.g., a 3′ UTR) that specifically recognizes a substrate RNA (e.g., a 3′ UTR from a retrotransposon (e.g., a 3′ UTR from a non-LTR retrotransposon (e.g., an RLE-type e.g., a R2 retrotransposon)). See, e.g., Luan and Eickbush, Mol Cell Biol 15, 3882-91 (1995)), the entire contents of which are incorporated herein by reference for all purposes. Exemplary 3′ UTRs from retrotransposons are described in WO2021178720 (see, e.g., Table 3), the entire contents of which are incorporated herein by reference for all purposes. In some embodiments, the RT is dimeric (e.g., homodimeric, heterodimeric). In some embodiments, the RT is monomeric.

[0211] In some embodiments, the RT comprises or consists of a full-length RT. In some embodiments, the RT comprises or consists of a functional fragment of a RT. In some embodiments, the RT comprises or consists of a functional variant of a RT. In some embodiments, the RT comprises or consists of a functional fragment and functional variant of a RT. In some embodiments, the RT comprises or consists of one or more domains of a RT. In some embodiments, the RT comprises or consists of a functional fragment of one or more domains of a RT. In some embodiments the RT comprises or consists of a functional variant of one or more domains of a RT. In some embodiments, the RT comprises or consists of a functional fragment and functional variant of one or more domains of a RT.

[0212] In some embodiments, the RT (or a functional fragment, functional variant, or domain thereof) is a naturally occurring RT. In some embodiments, the RT comprises or consists of a functional fragment of a naturally occurring RT. In some embodiments, the RT comprises or consists of a functional variant of a naturally occurring RT. In some embodiments, the RT comprises or consists of a functional fragment and functional variant of a naturally occurring RT. In some embodiments, the RT comprises or consists of one or more domains of a naturally occurring RT. In some embodiments, the RT comprises or consists of a functional fragment of one or more domains of a naturally occurring RT. In some embodiments the RT comprises or consists of a functional variant of one or more domains of a naturally occurring RT. In some embodiments, the RT comprises or consists of a functional fragment and functional variant of one or more domains of a naturally occurring RT.

[0213] In some embodiments, the RT (or a functional fragment, functional variant, or domain thereof) comprises the amino acid sequence of a naturally occurring RT. In some embodiments, the RT (or the functional fragment, functional variant, or domain thereof) comprises an amino acid sequence that comprises at least 1 amino acid variation relative to the amino acid sequence of the naturally occurring RT. In some embodiments, the amino acid sequence of the RT (or the functional fragment, functional variant, or domain thereof) comprises or consists of an amino acid sequence at least 85%, 86%, 87%, 88%, 89%, 90%, 91%, 92%, 93%, 94%, 95%, 96%, 97%, 98%, 99%, or 100% identical to the amino acid sequence of a naturally occurring RT. In some embodiments, the amino acid sequence of the RT (or the functional fragment, functional variant, or domain thereof) comprises or consists of the amino acid sequence of a naturally occurring RT, and further comprises 1 or more but less than 15% (e.g., less than 12%, less than 10%, less than 8%) amino acid variations (e.g., substitutions, additions, deletions, etc.). In some embodiments, the amino acid sequence of the RT (or the functional fragment, functional variant, or domain thereof) comprises or consists of the amino acid sequence of a naturally occurring RT, and further comprises or consists of at least about 1, 2, 3, 4, 5, 6, 7, 8, 9, or 10 amino acid variations (e.g., substitutions, additions, deletions, etc.). In some embodiments, the amino acid sequence of the RT (or the functional fragment, functional variant, or domain thereof) comprises or consists of the amino acid sequence of a naturally occurring RT, and further comprises or consists of about 1, 2, 3, 4, 5, 6, 7, 8, 9, or 10 amino acid variations (e.g., substitutions, additions, deletions, etc.). In some embodiments, the amino acid sequence of the RT (or the functional fragment, functional variant, or domain thereof) comprises or consists of the amino acid sequence of a naturally occurring RT, and further comprises or consists of no more than about 1, 2, 3, 4, 5, 6, 7, 8, 9, or 10 amino acid variations (e.g., substitutions, additions, deletions, etc.). In some embodiments, the amino acid sequence of the RT (or the functional fragment, functional variant, or domain thereof) comprises or consists of the amino acid sequence of a naturally occurring RT, and further comprises 1 or more but less than 15% (less than 12%, less than 10%, less than 8%), amino acid substitutions. In some embodiments, the amino acid sequence of the RT (or the functional fragment, functional variant, or domain thereof) comprises or consists of the amino acid sequence of a naturally occurring RT, and further comprises or consists of at least about 1, 2, 3, 4, 5, 6, 7, 8, 9, or 10 amino acid substitutions. In some embodiments, the amino acid sequence of the RT (or the functional fragment, functional variant, or domain thereof) comprises or consists of the amino acid sequence of a naturally occurring RT, and further comprises or consists of about 1, 2, 3, 4, 5, 6, 7, 8, 9, or 10 amino acid substitutions. In some embodiments, the amino acid sequence of the RT (or the functional fragment, functional variant, or domain thereof) comprises or consists of the amino acid sequence of a naturally occurring RT, and further comprises or consists of no more than about 1, 2, 3, 4, 5, 6, 7, 8, 9, or 10 amino acid substitutions.

[0214] In some embodiments, the amino acid sequence of the RT (or a functional fragment, functional variant, or domain thereof) comprises one or more amino acid variations (e.g., relative to the amino acid sequence of a naturally occurring RT) that provide one or more improved properties e.g., relative to the amino acid sequence of a naturally occurring RT), including, e.g., lower error rates, thermostability, increased processivity, increased tolerance to inhibitors, increased reverse transcriptase speed, increased tolerance of modified nucleotides, mediate addition of modified DNA nucleotides, proof reading ability, DNA dependent DNA polymerase activity, or any combination of the foregoing. See, e.g., WO2001068895 and WO2018089860, the entire contents of each of which are incorporated herein by reference for all purposes.

[0215] Naturally occurring RTs are known in the art and described herein (see, e.g., Table 2). Naturally occurring RTs include, for example, but are not limited to, viral (e.g., retroviral) reverse transcriptases, non-LTR retrotransposon reverse transcriptases (e.g., APE-type, RLE-type), LTR retrotransposon reverse transcriptases, group II intron reverse transcriptases, diversity-generating retroelement reverse transcriptases, retron reverse transcriptases, telomerases, and retroplasmids reverse transcriptases. In some embodiments, the RT (or the functional fragment, functional variant, or domain thereof) is a eukaryotic RT or a prokaryotic RT. In some embodiments, the RT (or the functional fragment, functional variant, or domain thereof) is a viral RT or a bacterial RT.

[0216] In some embodiments, the RT (or the functional fragment, functional variant, or domain thereof) is a retroviral RT. In some embodiments, the RT (or the functional fragment, functional variant, or domain thereof) is a oncoretroviris RT or a spumavirus RT. In some embodiments, the RT (or the functional fragment, functional variant, or domain thereof) is an alpharetrovirus RT, betaretrovirus RT, deltaretrovirus RT, epsilonretrovirus RT, gammaretrovirus RT, lentivirus RT, bovispumavirus RT, equispumavirus RT, felispumavirus RT, prosimiispumavirus RT, or simiispumavirus RT. In some embodiments, the RT (or the functional fragment, functional variant, or domain thereof) is a murine leukemia virus (MLV) RT, a Moloney murine leukemia virus (M-MLV) RT, a Rous sarcoma virus (RSV) RT, an avian myeloblastosis virus (AMV) RT, a human immunodeficiency virus (HIV) RT (e.g., an HIV-1 RT, an HIV-2 RT), an avian leukosis virus RT, a mouse mammary tumor virus, a feline leukemia virus, a bovine leukemia virus (ALV) RT, a human t-lymphotropic virus (HTLV) RT (e.g., an HTLV-1 RT), a simian immunodeficiency virus (SIV) RT, or a feline immunodeficiency virus (FIV) RT.

[0217] In some embodiments, the RT (or the functional fragment, functional variant, or domain thereof) is a non-LTR retrotransposon. In some embodiments, the RT (or the functional fragment, functional variant, or domain thereof) is an APE-type non-LTR retrotransposon. In some embodiments, the RT (or the functional fragment, functional variant, or domain thereof) is an APE-type non-LTR retrotransposon from the R1, or Txl clade. In some embodiments, the RT (or the functional fragment, functional variant, or domain thereof) is an RLE-type non-LTR retrotransposon. In some embodiments, the RT (or the functional fragment, functional variant, or domain thereof) is an RLE-type non-LTR retrotransposon from the R2, NeSL, HERO, R4, or CRE clade. In some embodiments, the RT (or the functional fragment, functional variant, or domain thereof) is an R2 RLE-type non-LTR retrotransposon. In some embodiments, the RT (or the functional fragment, functional variant, or domain thereof) is a RT from R2Bm non-LTR retrotransposon, a RT from R2Tg non-LTR retrotransposon, a RT from LINE-1 non-LTR retrotransposon, or RT from Penelope or a Penelope-like element (PLE) non-LTR retrotransposon.

[0218] In some embodiments, the RT (or the functional fragment, functional variant, or domain thereof) is an LTR retrotransposon (e.g., a RT from the Tyl LTR retrotransposon). In some embodiments, the RT (or the functional fragment, functional variant, or domain thereof) is a group II intron. In some embodiments, the RT (or the functional fragment or functional variant thereof) is a group II intron maturase RT from Eubacterium rectale (Marathon RT) (see, e.g., Zhao et al. RNA 24:2 2018, the entire contents of which is incorporated herein by reference for all purposes); a group II intron LtrA RT; or thermostable group II intron RT (TGIRT). In some embodiments, the RT (or the functional fragment, functional variant, or domain thereof) is a diversity-generating retroelement (e.g., from the Bordetella bacteriophage BPP-1 diversity-generating retroelement). In some embodiments, the RT (or the functional fragment, functional variant, or domain thereof) is retron reverse transcriptase (e.g., a reverse transcriptase from Ec86 (RT86)). In some embodiments, the RT (or the functional fragment, functional variant, or domain thereof) is a telomerase (e.g., a RT from a TERT telomerase). In some embodiments, the RT (or the functional fragment, functional variant, or domain thereof) is retroplasmid reverse transcriptase (e.g., the RT from a Mauriceville plasmid).

[0219] The amino acid sequence of exemplary RTs is provided in Table 2 and in SEQ ID NOS: 324-476. The accession number of each exemplary RT is also provided in Table 2.

TABLE 2
Amino Acid Sequence of Exemplary Reverse Transcriptases.

| | | SEQ |
|---|---|---|
| Description | Amino Acid Sequence | ID NO |
| MMLV p80 RT | TLNIEDEHRLHETSKEPDVSLGSTWLSDFPQAWAETGGMGLAVRQAPL | 324 |
| ADS42990.1 | IIPLKATSTPVSIKQYPMSQEARLGIKPHIQRLLDQGILVPCQSPWNT | |
| | PLLPVKKPGTNDYRPVQDLREVNKRVEDIHPTVPNPYNLLSGLPPSHQ | |
| | WYTVLDLKDAFFCLRLHPTSQPLFAFEWRDPEMGISGQLTWTRLPQGF | |
| | KNSPTLFDEALHRDLADFRIQHPDLILLQYVDDLLLAATSELDCQQGT | |
| | RALLQTLGNLGYRASAKKAQICQKQVKYLGYLLKEGQRWLTEARKETV | |
| | MGQPTPKTPRQLREFLGTAGFCRLWIPGFAEMAAPLYPLTKTGTLFNW | |
| | GPDQQKAYQEIKQALLTAPALGLPDLTKPFELFVDEKQGYAKGVLTQK | |
| | LGPWRRPVAYLSKKLDPVAAGWPPCLRMVAAIAVLTKDAGKLTMGQPL | |
| | VILAPHAVEALVKQPPDRWLSNARMTHYQALLLDTDRVQFGPVVALNP | |
| | ATLLPLPEEGLQHNCLDILAEAHGTRPDLTDQPLPDADHTWYTDGSSL | |
| | LQEGQRKAGAAVTTETEVIWAKALPAGTSAQRAELIALTQALKMAEGK | |
| | KLNVYTDSRYAFATAHIHGEIYRRRGLLTSEGKEIKNKDEILALLKAL | |
| | FLPKRLSIIHCPGHQKGHSAEARGNRMADQAARKAAITETPDTSTLLI | |
| RSV RT | TVALHLAIPLKWKPDHTPVWIDQWPLPEGKLVALTQLVEKELQLGHIE | 325 |
| AAC82561.1 | PSLSCWNTPVFVIRKASGSYRLLHDLRAVNAKLVPFGAVQQGAPVLSA | |
| | LPRGWPLMVLDLKDCFFSIPLAEQDREAFAFTLPSVNNQAPARRFQWK | |
| | VLPQGMTCSPTICQLVVGQVLEPLRLKHPSLCMLHYMDDLLLAASSHD | |
| | GLEAAGEEVISTLERAGFTISPDKVQREPGVQYLGYKLGSTYVAPVGL | |
| | VAEPRIATLWDVQKLVGSLQWLRPALGIPPRLMGPFYEQLRGSDPNEA | |
| | REWNLDMKMAWREIVRLSTTAALERWDPALPLEGAVARCEQGAIGVLG | |
| | QGLSTHPRPCLWLFSTQPTKAFTAWLEVLTLLITKLRASAVRTFGKEV | |
| | DILLLPACFREDLPLPEGILLALKGFAGKIRSSDTPSIFDIARPLHVS | |
| | LKVRVTDHPVPGPTVFTDASSSTHKGVVVWREGPRWEIKEIADLGASV | |
| | QQLEARAVAMALLLWPTTPTNVVTDSAFVAKMLLKMGQEGVPSTAAAF | |
| | ILEDALSQRSAMAAVLHVRSHSEVPGFFTEGNDVADSQATFQAYPLRE | |
| | AKDLHTALHIGPRALSKACNISMQQAREVVQTCPHCNSAPALEAGVNP | |
| | RGLGPLQIWQTDFTLEPRMAPRSWLAVTVDTASSAIVVTQHGRVTSVA | |
| | VQHHWATAIAVLGRPKAIKTDNGSCFTSKSTREWLARWGIAHTTGIPG | |
| | NSQGQAMVERANRLLKDRIRVLAEGDGFMKRIPTSKQGELLAKAMYAL | |
| | NHFERGENTKTPIQKHWRPTVLTEGPPVKIRIETGEWEKGWNVLVWGR | |
| | GYAAVKNRDTDKVIWVPSRKVKPDITQKDEVTKKDEASPLFAG | |
| AMV RT | TVALHLAIPLKWKPNHTPVWIDQWPLPEGKLVALTQLVEKELQLGHIE | 326 |
| HW606680.1 | PSLSCWNTPVFVIRKASGSYRLLHDLRAVNAKLVPFGAVQQGAPVLSA | |
| | LPRGWPLMVLDLKDCFFSIPLAEQDREAFAFTLPSVNNQAPARRFQWK | |
| | VLPQGMTCSPTICQLIVGQILEPLRLKHPSLRMLHYMDDLLLAASSHD | |
| | GLEAAGEEVISTLERAGFTISPDKVQREPGVQYLGYKLGSTYVAPVGL | |
| | VAEPRIATLWDVQKLVGSLQWLRPALGIPPRLMGPFYEQLRGSDPNEA | |
| | REWNLDMKMAWREIVQLSTTAALERWDPALPLEGAVARCEQGAIGVLG | |
| | QGLSTHPRPCLWLFSTQPTKAFTAWLEVLTLLITKLRASAVRTFGKEV | |
| | DILLLPACFREDLPLPEGILLALRGFAGKIRSSDTPSIFDIARPLHVS | |
| | LKVRVTDHPVPGPTVFTDASSSTHKGVVVWREGPRWEIKEIADLGASV | |
| | QQLEARAVAMALLLWPTTPTNVVTDSAFVAKMLLKMGQEGVPSTAAAF | |
| | ILEDALSQRSAMAAVLHVRSHSEVPGFFTEGNDVADSQATFQAY | |
| HIV RT | PISPIETVPVKLKPGMDGPKVKQWPLTEEKIKALVEICTEMEKEGKIS | 327 |
| P04585 (588- | KIGPENPYNTPVFAIKKKDSTKWRKLVDFRELNKRTQDFWEVQLGIPH | |
| 1147) | PAGLKKKKSVTVLDVGDAYFSVPLDEDERKYTAFTIPSINNETPGIRY | |
| | QYNVLPQGWKGSPAIFQSSMTKILEPFRKQNPDIVIYQYMDDLYVGSD | |
| | LEIGQHRTKIEELRQHLLRWGLTTPDKKHQKEPPFLWMGYELHPDKWT | |
| | VQPIVLPEKDSWTVNDIQKLVGKLNWASQIYPGIKVRQLCKLLRGTKA | |
| | LTEVIPLTEEAELELAENREILKEPVHGVYYDPSKDLIAEIQKQGQGQ | |
| | WTYQIYQEPFKNLKTGKYARMRGAHTNDVKQLTEAVQKITTESIVIWG | |
| | KTPKFKLPIQKETWETWWTEYWQATWIPEWEFVNTPPLVKLWYQLEKE | |
| | PIVGAETFYVDGAANRETKLGKAGYVTNRGRQKVVTLTDTTNQKTELQ | |
| | AIYLALQDSGLEVNIVTDSQYALGIIQAQPDQSESELVNQIIEQLIKK | |
| | EKVYLAWVPAHKGIGGNEQVDKLVSAGIRKVL | |
| AVIRE_P03360 | TAPLEEEYRLFLEAPIQNVILLEQWKREIPKVWAEINPPGLASTQAPI | 328 |
| | HVQLLSTALPVRVRQYPITLEAKRSLRETIRKFRAAGILRPVHSPWNT | |
| | PLLPVRKSGTSEYRMVQDLREVNKRVETIHPTVPNPYTLLSLLPPDRI | |
| | WYSVLDLKDAFFCIPLAPESQLIFAFEWADAEEGESGQLTWTRLPQGF | |
| | KNSPTLFDEALNRDLQGFRLDHPSVSLLQYVDDLLIAADTQAACLSAT | |
| | RDLLMTLAELGYRVSGKKAQLCQEEVTYLGFKIHKGSRSLSNSRTQAI | |
| | LQIPVPKTKRQVREFLGTIGYCRLWIPGFAELAQPLYAATRGGNDPLV | |
| | WGEKEEEAFQSLKLALTQPPALALPSLDKPFQLFVEETSGAAKGVLTQ | |
| | ALGPWKRPVAYLSKRLDPVAAGWPRCLRAIAAAALLTREASKLTFGQD | |
| | IEITSSHNLESLLRSPPDKWLTNARITQYQVLLLDPPRVRFKQTAALN | |
| | PATLLPETDDTLPIHHCLDTLDSLTSTRPDLTDQPLAQAEATLFTDGS | |
| | SYIRDGKRYAGAAVVTLDSVIWAEPLPIGTSAQKAELIALTKALEWSK | |
| | DKSVNIYTDSRYAFATLHVHGMIYRERGLLTAGGKAIKNAPEILALLT | |
| | AVWLPKRVAVMHCKGHQKDDAPTSTGNRRADEVAREVAIRPLSTQATI | |
| | S | |
| AVIRE_P03360_ | TAPLEEEYRLFLEAPIQNVTLLEQWKREIPKVWAEINPPGLASTQAPI | 329 |
| 3mut | HVQLLSTALPVRVRQYPITLEAKRSLRETIRKFRAAGILRPVHSPWNT | |
| | PLLPVRKSGTSEYRMVQDLREVNKRVETIHPTVPNPYTLLSLLPPDRI | |
| | WYSVLDLKDAFFCIPLAPESQLIFAFEWADAEEGESGQLTWTRLPQGF | |
| | KNSPTLFNEALNRDLQGFRLDHPSVSLLQYVDDLLIAADTQAACLSAT | |
| | RDLLMTLAELGYRVSGKKAQLCQEEVTYLGFKIHKGSRSLSNSRTQAI | |
| | LQIPVPKTKRQVREFLGTIGYCRLWIPGFAELAQPLYAATRPGNDPLV | |
| | WGEKEEEAFQSLKLALTQPPALALPSLDKPFQLFVEETSGAAKGVLTQ | |
| | ALGPWKRPVAYLSKRLDPVAAGWPRCLRAIAAAALLTREASKLTFGQD | |
| | IEITSSHNLESLLRSPPDKWLTNARITQYQVLLLDPPRVRFKQTAALN | |
| | PATLLPETDDTLPIHHCLDTLDSLTSTRPDLTDQPLAQAEATLFTDGS | |
| | SYIRDGKRYAGAAVVTLDSVIWAEPLPIGTSAQKAELIALTKALEWSK | |
| | DKSVNIYTDSRYAFATLHVHGMIYRERGWLTAGGKAIKNAPEILALLT | |
| | AVWLPKRVAVMHCKGHQKDDAPTSTGNRRADEVAREVAIRPLSTQATI | |
| | S | |
| AVIRE_P03360_ | TAPLEEEYRLFLEAPIQNVTLLEQWKREIPKVWAEINPPGLASTQAPI | 330 |
| 3mutA | HVQLLSTALPVRVRQYPITLEAKRSLRETIRKFRAAGILRPVHSPWNT | |
| | PLLPVRKSGTSEYRMVQDLREVNKRVETIHPTVPNPYTLLSLLPPDRI | |
| | WYSVLDLKDAFFCIPLAPESQLIFAFEWADAEEGESGQLTWTRLPQGF | |
| | KNSPTLFNEALNRDLQGFRLDHPSVSLLQYVDDLLIAADTQAACLSAT | |
| | RDLLMTLAELGYRVSGKKAQLCQEEVTYLGFKIHKGSRSLSNSRTQAI | |
| | LQIPVPKTKRQVREFLGKIGYCRLFIPGFAELAQPLYAATRPGNDPLV | |
| | WGEKEEEAFQSLKLALTQPPALALPSLDKPFQLFVEETSGAAKGVLTQ | |
| | ALGPWKRPVAYLSKRLDPVAAGWPRCLRAIAAAALLTREASKLTFGQD | |
| | IEITSSHNLESLLRSPPDKWLTNARITQYQVLLLDPPRVRFKQTAALN | |
| | PATLLPETDDTLPIHHCLDTLDSLTSTRPDLTDQPLAQAEATLFTDGS | |
| | SYIRDGKRYAGAAVVTLDSVIWAEPLPIGTSAQKAELIALTKALEWSK | |
| | DKSVNIYTDSRYAFATLHVHGMIYRERGWLTAGGKAIKNAPEILALLT | |
| | AVWLPKRVAVMHCKGHQKDDAPTSTGNRRADEVAREVAIRPLSTQATI | |
| | S | |
| BAEVM_P10272 | TVSLQDEHRLFDIPVTTSLPDVWLQDFPQAWAETGGLGRAKCQAPIII | 331 |
| | DLKPTAVPVSIKQYPMSLEAHMGIRQHIIKFLELGVLRPCRSPWNTPL | |
| | LPVKKPGTQDYRPVQDLREINKRTVDIHPTVPNPYNLLSTLKPDYSWY | |
| | TVLDLKDAFFCLPLAPQSQELFAFEWKDPERGISGQLTWTRLPQGFKN | |
| | SPTLFDEALHRDLTDFRTQHPEVTLLQYVDDLLLAAPTKKACTQGTRH | |
| | LLQELGEKGYRASAKKAQICQTKVTYLGYILSEGKRWLTPGRIETVAR | |
| | IPPPRNPREVREFLGTAGFCRLWIPGFAELAAPLYALTKESTPFTWQT | |
| | EHQLAFEALKKALLSAPALGLPDTSKPFTLFLDERQGIAKGVLTQKLG | |
| | PWKRPVAYLSKKLDPVAAGWPPCLRIMAATAMLVKDSAKLTLGQPLTV | |
| | ITPHTLEAIVRQPPDRWITNARLTHYQALLLDTDRVQFGPPVTLNPAT | |
| | LLPVPENQPSPHDCRQVLAETHGTREDLKDQELPDADHTWYTDGSSYL | |
| | DSGTRRAGAAVVDGHNTIWAQSLPPGTSAQKAELIALTKALELSKGKK | |
| | ANIYTDSRYAFATAHTHGSIYERRGLLTSEGKEIKNKAEIIALLKALF | |
| | LPQEVAIIHCPGHQKGQDPVAVGNRQADRVARQAAMAEVLTLATEPDN | |
| | TSHIT | |
| BAEVM_P10272_ | TVSLQDEHRLFDIPVTTSLPDVWLQDFPQAWAETGGLGRAKCQAPIII | 332 |
| 3mut | DLKPTAVPVSIKQYPMSLEAHMGIRQHIIKFLELGVLRPCRSPWNTPL | |
| | LPVKKPGTQDYRPVQDLREINKRTVDIHPTVPNPYNLLSTLKPDYSWY | |
| | TVLDLKDAFFCLPLAPQSQELFAFEWKDPERGISGQLTWTRLPQGFKN | |
| | SPTLFNEALHRDLTDFRTQHPEVTLLQYVDDLLLAAPTKKACTQGTRH | |
| | LLQELGEKGYRASAKKAQICQTKVTYLGYILSEGKRWLTPGRIETVAR | |
| | IPPPRNPREVREFLGTAGFCRLWIPGFAELAAPLYALTKPSTPFTWQT | |
| | EHQLAFEALKKALLSAPALGLPDTSKPFTLFLDERQGIAKGVLTQKLG | |
| | PWKRPVAYLSKKLDPVAAGWPPCLRIMAATAMLVKDSAKLTLGQPLTV | |
| | ITPHTLEAIVRQPPDRWITNARLTHYQALLLDTDRVQFGPPVTLNPAT | |
| | LLPVPENQPSPHDCRQVLAETHGTREDLKDQELPDADHTWYTDGSSYL | |
| | DSGTRRAGAAVVDGHNTIWAQSLPPGTSAQKAELIALTKALELSKGKK | |
| | ANIYTDSRYAFATAHTHGSIYERRGWLTSEGKEIKNKAEIIALLKALF | |
| | LPQEVAIIHCPGHQKGQDPVAVGNRQADRVARQAAMAEVLTLATEPDN | |
| | TSHIT | |
| BAEVM_P10272_ | TVSLQDEHRLFDIPVTTSLPDVWLQDFPQAWAETGGLGRAKCQAPIII | 333 |
| 3mutA | DLKPTAVPVSIKQYPMSLEAHMGIRQHIIKFLELGVLRPCRSPWNTPL | |
| | LPVKKPGTQDYRPVQDLREINKRTVDIHPTVPNPYNLLSTLKPDYSWY | |
| | TVLDLKDAFFCLPLAPQSQELFAFEWKDPERGISGQLTWTRLPQGFKN | |
| | SPTLFNEALHRDLTDFRTQHPEVTLLQYVDDLLLAAPTKKACTQGTRH | |
| | LLQELGEKGYRASAKKAQICQTKVTYLGYILSEGKRWLTPGRIETVAR | |
| | IPPPRNPREVREFLGKAGFCRLFIPGFAELAAPLYALTKPSTPFTWQT | |
| | EHQLAFEALKKALLSAPALGLPDTSKPFTLFLDERQGIAKGVLTQKLG | |
| | PWKRPVAYLSKKLDPVAAGWPPCLRIMAATAMLVKDSAKLTLGQPLTV | |
| | ITPHTLEAIVRQPPDRWITNARLTHYQALLLDTDRVQFGPPVTLNPAT | |
| | LLPVPENQPSPHDCRQVLAETHGTREDLKDQELPDADHTWYTDGSSYL | |
| | DSGTRRAGAAVVDGHNTIWAQSLPPGTSAQKAELIALTKALELSKGKK | |
| | ANIYTDSRYAFATAHTHGSIYERRGWLTSEGKEIKNKAEIIALLKALF | |
| | LPQEVAIIHCPGHQKGQDPVAVGNRQADRVARQAAMAEVLTLATEPDN | |
| | TSHIT | |
| BLVAU_P25059 | GVLDAPPSHIGLEHLPPPPEVPQFPLNLERLQALQDLVHRSLEAGYIS | 334 |
| | PWDGPGNNPVFPVRKPNGAWRFVHDLRVTNALTKPIPALSPGPPDLTA | |
| | IPTHLPHIICLDLKDAFFQIPVEDRFRSYFAFTLPTPGGLQPHRRFAW | |
| | RVLPQGFINSPALFERALQEPLRQVSAAFSQSLLVSYMDDILYVSPTE | |
| | EQRLQCYQTMAAHLRDLGFQVASEKTRQTPSPVPFLGQMVHERMVTYQ | |
| | SLPTLQISSPISLHQLQTVLGDLQWVSRGTPTTRRPLQLLYSSLKGID | |
| | DPRAIIHLSPEQQQGIAELRQALSHNARSRYNEQEPLLAYVHLTRAGS | |
| | TLVLFQKGAQFPLAYFQTPLTDNQASPWGLLLLLGCQYLQAQALSSYA | |
| | KTILKYYHNLPKTSLDNWIQSSEDPRVQELLQLWPQISSQGIQPPGPW | |
| | KTLVTRAEVFLTPQFSPEPIPAALCLESDGAARRGAYCLWKDHLLDFQ | |
| | AVPAPESAQKGELAGLLAGLAAAPPEPLNIWVDSKYLYSLLRTLVLGA | |
| | WLQPDPVPSYALLYKSLLRHPAIFVGHVRSHSSASHPIASLNNYVDQL | |
| BLVAU_P25059_ | GVLDAPPSHIGLEHLPPPPEVPQFPLNLERLQALQDLVHRSLEAGYIS | 335 |
| 2mut | PWDGPGNNPVFPVRKPNGAWRFVHDLRVTNALTKPIPALSPGPPDLTA | |
| | IPTHLPHIICLDLKDAFFQIPVEDRFRSYFAFTLPTPGGLQPHRRFAW | |
| | RVLPQGFINSPALFQRALQEPLRQVSAAFSQSLLVSYMDDILYVSPTE | |
| | EQRLQCYQTMAAHLRDLGFQVASEKTRQTPSPVPFLGQMVHERMVTYQ | |
| | SLPTLQISSPISLHQLQTVLGDLQWVSRGTPTTRRPLQLLYSSLKPID | |
| | DPRAIIHLSPEQQQGIAELRQALSHNARSRYNEQEPLLAYVHLTRAGS | |
| | TLVLFQKGAQFPLAYFQTPLTDNQASPWGLLLLLGCQYLQAQALSSYA | |
| | KTILKYYHNLPKTSLDNWIQSSEDPRVQELLQLWPQISSQGIQPPGPW | |
| | KTLVTRAEVFLTPQFSPEPIPAALCLESDGAARRGAYCLWKDHLLDFQ | |
| | AVPAPESAQKGELAGLLAGLAAAPPEPLNIWVDSKYLYSLLRTLVLGA | |
| | WLQPDPVPSYALLYKSLLRHPAIFVGHVRSHSSASHPIASLNNYVDQL | |
| BLVJ_P03361 | GVLDTPPSHIGLEHLPPPPEVPQFPLNLERLQALQDLVHRSLEAGYIS | 336 |
| | PWDGPGNNPVFPVRKPNGAWRFVHDLRATNALTKPIPALSPGPPDLTA | |
| | IPTHPPHIICLDLKDAFFQIPVEDRFRFYLSFTLPSPGGLQPHRRFAW | |
| | RVLPQGFINSPALFERALQEPLRQVSAAFSQSLLVSYMDDILYASPTE | |
| | EQRSQCYQALAARLRDLGFQVASEKTSQTPSPVPFLGQMVHEQIVTYQ | |
| | SLPTLQISSPISLHQLQAVLGDLQWVSRGTPTTRRPLQLLYSSLKRHH | |
| | DPRAIIQLSPEQLQGIAELRQALSHNARSRYNEQEPLLAYVHLTRAGS | |
| | TLVLFQKGAQFPLAYFQTPLTDNQASPWGLLLLLGCQYLQTQALSSYA | |
| | KPILKYYHNLPKTSLDNWIQSSEDPRVQELLQLWPQISSQGIQPPGPW | |
| | KTLITRAEVFLTPQFSPDPIPAALCLFSDGATGRGAYCLWKDHLLDFQ | |
| | AVPAPESAQKGELAGLLAGLAAAPPEPVNIWVDSKYLYSLLRTLVLGA | |
| | WLQPDPVPSYALLYKSLLRHPAIVVGHVRSHSSASHPIASLNNYVDQL | |
| BLVJ_P03361_ | GVLDTPPSHIGLEHLPPPPEVPQFPLNLERLQALQDLVHRSLEAGYIS | 337 |
| 2mut | PWDGPGNNPVFPVRKPNGAWRFVHDLRATNALTKPIPALSPGPPDLTA | |
| | IPTHPPHIICLDLKDAFFQIPVEDRFRFYLSFTLPSPGGLQPHRRFAW | |
| | RVLPQGFINSPALFNRALQEPLRQVSAAFSQSLLVSYMDDILYASPTE | |
| | EQRSQCYQALAARLRDLGFQVASEKTSQTPSPVPFLGQMVHEQIVTYQ | |
| | SLPTLQISSPISLHQLQAVLGDLQWVSRGTPTTRRPLQLLYSSLKRHH | |
| | DPRAIIQLSPEQLQGIAELRQALSHNARSRYNEQEPLLAYVHLTRAGS | |
| | TLVLFQKGAQFPLAYFQTPLTDNQASPWGLLLLLGCQYLQTQALSSYA | |
| | KPILKYYHNLPKTSLDNWIQSSEDPRVQELLQLWPQISSQGIQPPGPW | |
| | KTLITRAEVFLTPQFSPDPIPAALCLFSDGATGRGAYCLWKDHLLDFQ | |
| | AVPAPESAQKGELAGLLAGLAAAPPEPVNIWVDSKYLYSLLRTWVLGA | |
| | WLQPDPVPSYALLYKSLLRHPAIVVGHVRSHSSASHPIASLNNYVDQL | |
| BLVJ_P03361_ | GVLDTPPSHIGLEHLPPPPEVPQFPLNLERLQALQDLVHRSLEAGYIS | 338 |
| 2mutB | PWDGPGNNPVFPVRKPNGAWRFVHDLRATNALTKPIPALSPGPPDLTA | |
| | PPTHPPHIICLDLKDAFFQIPVEDRFRFYLSFTLPSPGGLQPHRRFAW | |
| | RVLPQGFINSPALFQRALQEPLRQVSAAFSQSLLVSYMDDILYASPTE | |
| | EQRSQCYQALAARLRDLGFQVASEKTSQTPSPVPFLGQMVHEQIVTYQ | |
| | SLPTLQISSPISLHQLQAVLGDLQWVSRGTPTTRRPLQLLYSSLKRHH | |
| | DPRAIIQLSPEQLQGIAELRQALSHNARSRYNEQEPLLAYVHLTRAGS | |
| | TLVLFQKGAQFPLAYFQTPLTDNQASPWGLLLLLGCQYLQTQALSSYA | |
| | KPILKYYHNLPKTSLDNWIQSSEDPRVQELLQLWPQISSQGIQPPGPW | |
| | KTLITRAEVFLTPQFSPDPIPAALCLFSDGATGRGAYCLWKDHLLDFQ | |
| | AVPAPESAQKGELAGLLAGLAAAPPEPVNIWVDSKYLYSLLRTWVLGA | |
| | WLQPDPVPSYALLYKSLLRHPAIVVGHVRSHSSASHPIASLNNYVDQL | |
| FFV_O93209 | MDLLKPLTVERKGVKIKGYWNSQADITCVPKDLLQGEEPVRQQNVTTI | 339 |
| | HGTQEGDVYYVNLKIDGRRINTEVIGTTLDYAIITPGDVPWILKKPLE | |
| | LTIKLDLEEQQGTLLNNSILSKKGKEELKQLFEKYSALWQSWENQVGH | |
| | RRIRPHKIATGTVKPTPQKQYHINPKAKPDIQIVINDLLKQGVLIQKE | |
| | STMNTPVYPVPKPNGRWRMVLDYRAVNKVTPLIAVQNQHSYGILGSLF | |
| | KGRYKTTIDLSNGFWAHPIVPEDYWITAFTWQGKQYCWTVLPQGELNS | |
| | PGLFTGDVVDLLQGIPNVEVYVDDVYISHDSEKEHLEYLDILFNRLKE | |
| | AGYIISLKKSNIANSIVDFLGFQITNEGRGLTDTFKEKLENITAPTTL | |
| | KQLQSILGLLNFARNFIPDFTELIAPLYALIPKSTKNYVPWQIEHSTT | |
| | LETLITKLNGAEYLQGRKGDKTLIMKVNASYTTGYIRYYNEGEKKPIS | |
| | YVSIVFSKTELKFTELEKLLTTVHKGLLKALDLSMGQNIHVYSPIVSM | |
| | QNIQKTPQTAKKALASRWLSWLSYLEDPRIRFFYDPQMPALKDLPAVD | |
| | TGKDNKKHPSNFQHIFYTDGSAITSPTKEGHLNAGMGIVYFINKDGNL | |
| | QKQQEWSISLGNHTAQFAEIAAFEFALKKCLPLGGNILVVTDSNYVAK | |
| | AYNEELDVWASNGFVNNRKKPLKHISKWKSVADLKRLRPDVVVTHEPG | |
| | HQKLDSSPHAYGNNLADQLATQASFKVH | |
| FFV_O93209_ | MDLLKPLTVERKGVKIKGYWNSQADITCVPKDLLQGEEPVRQQNVTTI | 340 |
| 2mut | HGTQEGDVYYVNLKIDGRRINTEVIGTTLDYAIITPGDVPWILKKPLE | |
| | LTIKLDLEEQQGTLLNNSILSKKGKEELKQLFEKYSALWQSWENQVGH | |
| | RRIRPHKIATGTVKPTPQKQYHINPKAKPDIQIVINDLLKQGVLIQKE | |
| | STMNTPVYPVPKPNGRWRMVLDYRAVNKVTPLIAVQNQHSYGILGSLF | |
| | KGRYKTTIDLSNGFWAHPIVPEDYWITAFTWQGKQYCWTVLPQGELNS | |
| | PGLFNGDVVDLLQGIPNVEVYVDDVYISHDSEKEHLEYLDILFNRLKE | |
| | AGYIISLKKSNIANSIVDFLGFQITNEGRGLTDTFKEKLENITAPTTL | |
| | KQLQSILGLLNFARNFIPDFTELIAPLYALIPKSPKNYVPWQIEHSTT | |
| | LETLITKLNGAEYLQGRKGDKTLIMKVNASYTTGYIRYYNEGEKKPIS | |
| | YVSIVFSKTELKFTELEKLLTTVHKGLLKALDLSMGQNIHVYSPIVSM | |
| | QNIQKTPQTAKKALASRWLSWLSYLEDPRIRFFYDPQMPALKDLPAVD | |
| | TGKDNKKHPSNFQHIFYTDGSAITSPTKEGHLNAGMGIVYFINKDGNL | |
| | QKQQEWSISLGNHTAQFAEIAAFEFALKKCLPLGGNILVVTDSNYVAK | |
| | AYNEELDVWASNGFVNNRKKPLKHISKWKSVADLKRLRPDVVVTHEPG | |
| | HQKLDSSPHAYGNNLADQLATQASFKVH | |
| FFV_O93209_ | MDLLKPLTVERKGVKIKGYWNSQADITCVPKDLLQGEEPVRQQNVTTI | 341 |
| 2mutA | HGTQEGDVYYVNLKIDGRRINTEVIGTTLDYAIITPGDVPWILKKPLE | |
| | LTIKLDLEEQQGTLLNNSILSKKGKEELKQLFEKYSALWQSWENQVGH | |
| | RRIRPHKIATGTVKPTPQKQYHINPKAKPDIQIVINDLLKQGVLIQKE | |
| | STMNTPVYPVPKPNGRWRMVLDYRAVNKVTPLIAVQNQHSYGILGSLF | |
| | KGRYKTTIDLSNGFWAHPIVPEDYWITAFTWQGKQYCWTVLPQGELNS | |
| | PGLFNGDVVDLLQGIPNVEVYVDDVYISHDSEKEHLEYLDILFNRLKE | |
| | AGYIISLKKSNIANSIVDFLGFQITNEGRGLTDTFKEKLENITAPTTL | |
| | KQLQSILGKLNFARNFIPDFTELIAPLYALIPKSPKNYVPWQIEHSTT | |
| | LETLITKLNGAEYLQGRKGDKTLIMKVNASYTTGYIRYYNEGEKKPIS | |
| | YVSIVFSKTELKFTELEKLLTTVHKGLLKALDLSMGQNIHVYSPIVSM | |
| | QNIQKTPQTAKKALASRWLSWLSYLEDPRIRFFYDPQMPALKDLPAVD | |
| | TGKDNKKHPSNFQHIFYTDGSAITSPTKEGHLNAGMGIVYFINKDGNL | |
| | QKQQEWSISLGNHTAQFAEIAAFEFALKKCLPLGGNILVVTDSNYVAK | |
| | AYNEELDVWASNGFVNNRKKPLKHISKWKSVADLKRLRPDVVVTHEPG | |
| | HQKLDSSPHAYGNNLADQLATQASFKVH | |
| FFV_O93209- | VPWILKKPLELTIKLDLEEQQGTLLNNSILSKKGKEELKQLFEKYSAL | 342 |
| Pro | WQSWENQVGHRRIRPHKIATGTVKPTPQKQYHINPKAKPDIQIVINDL | |
| | LKQGVLIQKESTMNTPVYPVPKPNGRWRMVLDYRAVNKVTPLIAVQNQ | |
| | HSYGILGSLFKGRYKTTIDLSNGFWAHPIVPEDYWITAFTWQGKQYCW | |
| | TVLPQGFLNSPGLFTGDVVDLLQGIPNVEVYVDDVYISHDSEKEHLEY | |
| | LDILFNRLKEAGYIISLKKSNIANSIVDFLGFQITNEGRGLTDTFKEK | |
| | LENITAPTTLKQLQSILGLLNFARNFIPDFTELIAPLYALIPKSTKNY | |
| | VPWQIEHSTTLETLITKLNGAEYLQGRKGDKTLIMKVNASYTTGYIRY | |
| | YNEGEKKPISYVSIVFSKTELKFTELEKLLTTVHKGLLKALDLSMGQN | |
| | IHVYSPIVSMQNIQKTPQTAKKALASRWLSWLSYLEDPRIRFFYDPQM | |
| | PALKDLPAVDTGKDNKKHPSNFQHIFYTDGSAITSPTKEGHLNAGMGI | |
| | VYFINKDGNLQKQQEWSISLGNHTAQFAEIAAFEFALKKCLPLGGNIL | |
| | VVTDSNYVAKAYNEELDVWASNGFVNNRKKPLKHISKWKSVADLKRLR | |
| | PDVVVTHEPGHQKLDSSPHAYGNNLADQLATQASFKVH | |
| FFV_O93209- | VPWILKKPLELTIKLDLEEQQGTLLNNSILSKKGKEELKQLFEKYSAL | 343 |
| Pro_2mut | WQSWENQVGHRRIRPHKIATGTVKPTPQKQYHINPKAKPDIQIVINDL | |
| | LKQGVLIQKESTMNTPVYPVPKPNGRWRMVLDYRAVNKVTPLIAVQNQ | |
| | HSYGILGSLFKGRYKTTIDLSNGFWAHPIVPEDYWITAFTWQGKQYCW | |
| | TVLPQGFLNSPGLFNGDVVDLLQGIPNVEVYVDDVYISHDSEKEHLEY | |
| | LDILFNRLKEAGYIISLKKSNIANSIVDFLGFQITNEGRGLTDTFKEK | |
| | LENITAPTTLKQLQSILGLLNFARNFIPDFTELIAPLYALIPKSPKNY | |
| | VPWQIEHSTTLETLITKLNGAEYLQGRKGDKTLIMKVNASYTTGYIRY | |
| | YNEGEKKPISYVSIVFSKTELKFTELEKLLTTVHKGLLKALDLSMGQN | |
| | IHVYSPIVSMQNIQKTPQTAKKALASRWLSWLSYLEDPRIRFFYDPQM | |
| | PALKDLPAVDTGKDNKKHPSNFQHIFYTDGSAITSPTKEGHLNAGMGI | |
| | VYFINKDGNLQKQQEWSISLGNHTAQFAEIAAFEFALKKCLPLGGNIL | |
| | VVTDSNYVAKAYNEELDVWASNGFVNNRKKPLKHISKWKSVADLKRLR | |
| | PDVVVTHEPGHQKLDSSPHAYGNNLADQLATQASFKVH | |
| FFV_O93209- | VPWILKKPLELTIKLDLEEQQGTLLNNSILSKKGKEELKQLFEKYSAL | 344 |
| Pro_2mutA | WQSWENQVGHRRIRPHKIATGTVKPTPQKQYHINPKAKPDIQIVINDL | |
| | LKQGVLIQKESTMNTPVYPVPKPNGRWRMVLDYRAVNKVTPLIAVQNQ | |
| | HSYGILGSLFKGRYKTTIDLSNGFWAHPIVPEDYWITAFTWQGKQYCW | |
| | TVLPQGFLNSPGLFNGDVVDLLQGIPNVEVYVDDVYISHDSEKEHLEY | |
| | LDILFNRLKEAGYIISLKKSNIANSIVDFLGFQITNEGRGLTDTFKEK | |
| | LENITAPTTLKQLQSILGKLNFARNFIPDFTELIAPLYALIPKSPKNY | |
| | VPWQIEHSTTLETLITKLNGAEYLQGRKGDKTLIMKVNASYTTGYIRY | |
| | YNEGEKKPISYVSIVFSKTELKFTELEKLLTTVHKGLLKALDLSMGQN | |
| | IHVYSPIVSMQNIQKTPQTAKKALASRWLSWLSYLEDPRIRFFYDPQM | |
| | PALKDLPAVDTGKDNKKHPSNFQHIFYTDGSAITSPTKEGHLNAGMGI | |
| | VYFINKDGNLQKQQEWSISLGNHTAQFAEIAAFEFALKKCLPLGGNIL | |
| | VVTDSNYVAKAYNEELDVWASNGFVNNRKKPLKHISKWKSVADLKRLR | |
| | PDVVVTHEPGHQKLDSSPHAYGNNLADQLATQASFKVH | |
| FLV_P10273 | TLQLEEEYRLFEPESTQKQEMDIWLKNFPQAWAETGGMGTAHCQAPVL | 345 |
| | IQLKATATPISIRQYPMPHEAYQGIKPHIRRMLDQGILKPCQSPWNTP | |
| | LLPVKKPGTEDYRPVQDLREVNKRVEDIHPTVPNPYNLLSTLPPSHPW | |
| | YTVLDLKDAFFCLRLHSESQLLFAFEWRDPEIGLSGQLTWTRLPQGFK | |
| | NSPTLFDEALHSDLADFRVRYPALVLLQYVDDLLLAAATRTECLEGTK | |
| | ALLETLGNKGYRASAKKAQICLQEVTYLGYSLKDGQRWLTKARKEAIL | |
| | SIPVPKNSRQVREFLGTAGYCRLWIPGFAELAAPLYPLTRPGTLFQWG | |
| | TEQQLAFEDIKKALLSSPALGLPDITKPFELFIDENSGFAKGVLVQKL | |
| | GPWKRPVAYLSKKLDTVASGWPPCLRMVAAIAILVKDAGKLTLGQPLT | |
| | ILTSHPVEALVRQPPNKWLSNARMTHYQAMLLDAERVHFGPTVSLNPA | |
| | TLLPLPSGGNHHDCLQILAETHGTRPDLTDQPLPDADLTWYTDGSSFI | |
| | RNGEREAGAAVTTESEVIWAAPLPPGTSAQRAELIALTQALKMAEGKK | |
| | LTVYTDSRYAFATTHVHGEIYRRRGLLTSEGKEIKNKNEILALLEALF | |
| | LPKRLSIIHCPGHQKGDSPQAKGNRLADDTAKKAATETHSSLTVLP | |
| FLV_P10273_ | TLQLEEEYRLFEPESTQKQEMDIWLKNFPQAWAETGGMGTAHCQAPVL | 346 |
| 3mut | IQLKATATPISIRQYPMPHEAYQGIKPHIRRMLDQGILKPCQSPWNTP | |
| | LLPVKKPGTEDYRPVQDLREVNKRVEDIHPTVPNPYNLLSTLPPSHPW | |
| | YTVLDLKDAFFCLRLHSESQLLFAFEWRDPEIGLSGQLTWTRLPQGFK | |
| | NSPTLFNEALHSDLADFRVRYPALVLLQYVDDLLLAAATRTECLEGTK | |
| | ALLETLGNKGYRASAKKAQICLQEVTYLGYSLKDGQRWLTKARKEAIL | |
| | SIPVPKNSRQVREFLGTAGYCRLWIPGFAELAAPLYPLTRPGTLFQWG | |
| | TEQQLAFEDIKKALLSSPALGLPDITKPFELFIDENSGFAKGVLVQKL | |
| | GPWKRPVAYLSKKLDTVASGWPPCLRMVAAIAILVKDAGKLTLGQPLT | |
| | ILTSHPVEALVRQPPNKWLSNARMTHYQAMLLDAERVHFGPTVSLNPA | |
| | TLLPLPSGGNHHDCLQILAETHGTRPDLTDQPLPDADLTWYTDGSSFI | |
| | RNGEREAGAAVTTESEVIWAAPLPPGTSAQRAELIALTQALKMAEGKK | |
| | LTVYTDSRYAFATTHVHGEIYRRRGWLTSEGKEIKNKNEILALLEALF | |
| | LPKRLSIIHCPGHQKGDSPQAKGNRLADDTAKKAATETHSSLTVLP | |
| FLV_P10273_ | TLQLEEEYRLFEPESTQKQEMDIWLKNFPQAWAETGGMGTAHCQAPVL | 347 |
| 3mutA | IQLKATATPISIRQYPMPHEAYQGIKPHIRRMLDQGILKPCQSPWNTP | |
| | LLPVKKPGTEDYRPVQDLREVNKRVEDIHPTVPNPYNLLSTLPPSHPW | |
| | YTVLDLKDAFFCLRLHSESQLLFAFEWRDPEIGLSGQLTWTRLPQGFK | |
| | NSPTLFNEALHSDLADFRVRYPALVLLQYVDDLLLAAATRTECLEGTK | |
| | ALLETLGNKGYRASAKKAQICLQEVTYLGYSLKDGQRWLTKARKEAIL | |
| | SIPVPKNSRQVREFLGKAGYCRLFIPGFAELAAPLYPLTRPGTLFQWG | |
| | TEQQLAFEDIKKALLSSPALGLPDITKPFELFIDENSGFAKGVLVQKL | |
| | GPWKRPVAYLSKKLDTVASGWPPCLRMVAAIAILVKDAGKLTLGQPLT | |
| | ILTSHPVEALVRQPPNKWLSNARMTHYQAMLLDAERVHFGPTVSLNPA | |
| | TLLPLPSGGNHHDCLQILAETHGTRPDLTDQPLPDADLTWYTDGSSFI | |
| | RNGEREAGAAVTTESEVIWAAPLPPGTSAQRAELIALTQALKMAEGKK | |
| | LTVYTDSRYAFATTHVHGEIYRRRGWLTSEGKEIKNKNEILALLEALF | |
| | LPKRLSIIHCPGHQKGDSPQAKGNRLADDTAKKAATETHSSLTVLP | |
| FOAMV_P14350 | MNPLQLLQPLPAEIKGTKLLAHWNSGATITCIPESFLEDEQPIKKTLI | 348 |
| | KTIHGEKQQNVYYVTFKVKGRKVEAEVIASPYEYILLSPTDVPWLTQQ | |
| | PLQLTILVPLQEYQEKILSKTALPEDQKQQLKTLFVKYDNLWQHWENQ | |
| | VGHRKIRPHNIATGDYPPRPQKQYPINPKAKPSIQIVIDDLLKQGVLT | |
| | PQNSTMNTPVYPVPKPDGRWRMVLDYREVNKTIPLTAAQNQHSAGILA | |
| | TIVRQKYKTTLDLANGFWAHPITPESYWLTAFTWQGKQYCWTRLPQGF | |
| | LNSPALFTADVVDLLKEIPNVQVYVDDIYLSHDDPKEHVQQLEKVFQI | |
| | LLQAGYVVSLKKSEIGQKTVEFLGFNITKEGRGLTDTFKTKLLNITPP | |
| | KDLKQLQSILGLLNFARNFIPNFAELVQPLYNLIASAKGKYIEWSEEN | |
| | TKQLNMVIEALNTASNLEERLPEQRLVIKVNTSPSAGYVRYYNETGKK | |
| | PIMYLNYVFSKAELKFSMLEKLLTTMHKALIKAMDLAMGQEILVYSPI | |
| | VSMTKIQKTPLPERKALPIRWITWMTYLEDPRIQFHYDKTLPELKHIP | |
| | DVYTSSQSPVKHPSQYEGVFYTDGSAIKSPDPTKSNNAGMGIVHATYK | |
| | PEYQVLNQWSIPLGNHTAQMAEIAAVEFACKKALKIPGPVLVITDSFY | |
| | VAESANKELPYWKSNGFVNNKKKPLKHISKWKSIAECLSMKPDITIQH | |
| | EKGISLQIPVFILKGNALADKLATQGSYVVN | |
| FOAMV_P14350_ | MNPLQLLQPLPAEIKGTKLLAHWNSGATITCIPESFLEDEQPIKKTLI | 349 |
| 2mut | KTIHGEKQQNVYYVTFKVKGRKVEAEVIASPYEYILLSPTDVPWLTQQ | |
| | PLQLTILVPLQEYQEKILSKTALPEDQKQQLKTLFVKYDNLWQHWENQ | |
| | VGHRKIRPHNIATGDYPPRPQKQYPINPKAKPSIQIVIDDLLKQGVLT | |
| | PQNSTMNTPVYPVPKPDGRWRMVLDYREVNKTIPLTAAQNQHSAGILA | |
| | TIVRQKYKTTLDLANGFWAHPITPESYWLTAFTWQGKQYCWTRLPQGF | |
| | LNSPALFNADVVDLLKEIPNVQVYVDDIYLSHDDPKEHVQQLEKVFQI | |
| | LLQAGYVVSLKKSEIGQKTVEFLGFNITKEGRGLTDTFKTKLLNITPP | |
| | KDLKQLQSILGLLNFARNFIPNFAELVQPLYNLIAPAKGKYIEWSEEN | |
| | TKQLNMVIEALNTASNLEERLPEQRLVIKVNTSPSAGYVRYYNETGKK | |
| | PIMYLNYVFSKAELKFSMLEKLLTTMHKALIKAMDLAMGQEILVYSPI | |
| | VSMTKIQKTPLPERKALPIRWITWMTYLEDPRIQFHYDKTLPELKHIP | |
| | DVYTSSQSPVKHPSQYEGVFYTDGSAIKSPDPTKSNNAGMGIVHATYK | |
| | PEYQVLNQWSIPLGNHTAQMAEIAAVEFACKKALKIPGPVLVITDSFY | |
| | VAESANKELPYWKSNGFVNNKKKPLKHISKWKSIAECLSMKPDITIQH | |
| | EKGISLQIPVFILKGNALADKLATQGSYVVN | |
| FOAMV_P14350_ | MNPLQLLQPLPAEIKGTKLLAHWNSGATITCIPESFLEDEQPIKKTLI | 350 |
| 2mutA | KTIHGEKQQNVYYVTFKVKGRKVEAEVIASPYEYILLSPTDVPWLTQQ | |
| | PLQLTILVPLQEYQEKILSKTALPEDQKQQLKTLFVKYDNLWQHWENQ | |
| | VGHRKIRPHNIATGDYPPRPQKQYPINPKAKPSIQIVIDDLLKQGVLT | |
| | PQNSTMNTPVYPVPKPDGRWRMVLDYREVNKTIPLTAAQNQHSAGILA | |
| | TIVRQKYKTTLDLANGFWAHPITPESYWLTAFTWQGKQYCWTRLPQGF | |
| | LNSPALFNADVVDLLKEIPNVQVYVDDIYLSHDDPKEHVQQLEKVFQI | |
| | LLQAGYVVSLKKSEIGQKTVEFLGFNITKEGRGLTDTFKTKLLNITPP | |
| | KDLKQLQSILGKLNFARNFIPNFAELVQPLYNLIAPAKGKYIEWSEEN | |
| | TKQLNMVIEALNTASNLEERLPEQRLVIKVNTSPSAGYVRYYNETGKK | |
| | PIMYLNYVFSKAELKFSMLEKLLTTMHKALIKAMDLAMGQEILVYSPI | |
| | VSMTKIQKTPLPERKALPIRWITWMTYLEDPRIQFHYDKTLPELKHIP | |
| | DVYTSSQSPVKHPSQYEGVFYTDGSAIKSPDPTKSNNAGMGIVHATYK | |
| | PEYQVLNQWSIPLGNHTAQMAEIAAVEFACKKALKIPGPVLVITDSFY | |
| | VAESANKELPYWKSNGFVNNKKKPLKHISKWKSIAECLSMKPDITIQH | |
| | EKGISLQIPVFILKGNALADKLATQGSYVVN | |
| FOAMV_P14350- | VPWLTQQPLQLTILVPLQEYQEKILSKTALPEDQKQQLKTLFVKYDNL | 351 |
| Pro | WQHWENQVGHRKIRPHNIATGDYPPRPQKQYPINPKAKPSIQIVIDDL | |
| | LKQGVLTPQNSTMNTPVYPVPKPDGRWRMVLDYREVNKTIPLTAAQNQ | |
| | HSAGILATIVRQKYKTTLDLANGFWAHPITPESYWLTAFTWQGKQYCW | |
| | TRLPQGELNSPALFTADVVDLLKEIPNVQVYVDDIYLSHDDPKEHVQQ | |
| | LEKVFQILLQAGYVVSLKKSEIGQKTVEFLGFNITKEGRGLTDTFKTK | |
| | LLNITPPKDLKQLQSILGLLNFARNFIPNFAELVQPLYNLIASAKGKY | |
| | IEWSEENTKQLNMVIEALNTASNLEERLPEQRLVIKVNTSPSAGYVRY | |
| | YNETGKKPIMYLNYVFSKAELKFSMLEKLLTTMHKALIKAMDLAMGQE | |
| | ILVYSPIVSMTKIQKTPLPERKALPIRWITWMTYLEDPRIQFHYDKTL | |
| | PELKHIPDVYTSSQSPVKHPSQYEGVFYTDGSAIKSPDPTKSNNAGMG | |
| | IVHATYKPEYQVLNQWSIPLGNHTAQMAEIAAVEFACKKALKIPGPVL | |
| | VITDSFYVAESANKELPYWKSNGFVNNKKKPLKHISKWKSIAECLSMK | |
| | PDITIQHEKGISLQIPVFILKGNALADKLATQGSYVVN | |
| FOAMV_P14350- | VPWLTQQPLQLTILVPLQEYQEKILSKTALPEDQKQQLKTLFVKYDNL | 352 |
| Pro_2mut | WQHWENQVGHRKIRPHNIATGDYPPRPQKQYPINPKAKPSIQIVIDDL | |
| | LKQGVLTPQNSTMNTPVYPVPKPDGRWRMVLDYREVNKTIPLTAAQNQ | |
| | HSAGILATIVRQKYKTTLDLANGFWAHPITPESYWLTAFTWQGKQYCW | |
| | TRLPQGELNSPALFNADVVDLLKEIPNVQVYVDDIYLSHDDPKEHVQQ | |
| | LEKVFQILLQAGYVVSLKKSEIGQKTVEFLGFNITKEGRGLTDTFKTK | |
| | LLNITPPKDLKQLQSILGLLNFARNFIPNFAELVQPLYNLIAPAKGKY | |
| | IEWSEENTKQLNMVIEALNTASNLEERLPEQRLVIKVNTSPSAGYVRY | |
| | YNETGKKPIMYLNYVFSKAELKFSMLEKLLTTMHKALIKAMDLAMGQE | |
| | ILVYSPIVSMTKIQKTPLPERKALPIRWITWMTYLEDPRIQFHYDKTL | |
| | PELKHIPDVYTSSQSPVKHPSQYEGVFYTDGSAIKSPDPTKSNNAGMG | |
| | IVHATYKPEYQVLNQWSIPLGNHTAQMAEIAAVEFACKKALKIPGPVL | |
| | VITDSFYVAESANKELPYWKSNGFVNNKKKPLKHISKWKSIAECLSMK | |
| | PDITIQHEKGISLQIPVFILKGNALADKLATQGSYVVN | |
| FOAMV_P14350- | VPWLTQQPLQLTILVPLQEYQEKILSKTALPEDQKQQLKTLFVKYDNL | 353 |
| Pro_2mutA | WQHWENQVGHRKIRPHNIATGDYPPRPQKQYPINPKAKPSIQIVIDDL | |
| | LKQGVLTPQNSTMNTPVYPVPKPDGRWRMVLDYREVNKTIPLTAAQNQ | |
| | HSAGILATIVRQKYKTTLDLANGFWAHPITPESYWLTAFTWQGKQYCW | |
| | TRLPQGFLNSPALFNADVVDLLKEIPNVQVYVDDIYLSHDDPKEHVQQ | |
| | LEKVFQILLQAGYVVSLKKSEIGQKTVEFLGFNITKEGRGLTDTFKTK | |
| | LLNITPPKDLKQLQSILGKLNFARNFIPNFAELVQPLYNLIAPAKGKY | |
| | IEWSEENTKQLNMVIEALNTASNLEERLPEQRLVIKVNTSPSAGYVRY | |
| | YNETGKKPIMYLNYVFSKAELKFSMLEKLLTTMHKALIKAMDLAMGQE | |
| | ILVYSPIVSMTKIQKTPLPERKALPIRWITWMTYLEDPRIQFHYDKTL | |
| | PELKHIPDVYTSSQSPVKHPSQYEGVFYTDGSAIKSPDPTKSNNAGMG | |
| | IVHATYKPEYQVLNQWSIPLGNHTAQMAEIAAVEFACKKALKIPGPVL | |
| | VITDSFYVAESANKELPYWKSNGFVNNKKKPLKHISKWKSIAECLSMK | |
| | PDITIQHEKGISLQIPVFILKGNALADKLATQGSYVVN | |
| GALV_P21414 | VLNLEEEYRLHEKPVPSSIDPSWLQLFPTVWAERAGMGLANQVPPVVV | 354 |
| | ELRSGASPVAVRQYPMSKEAREGIRPHIQKFLDLGVLVPCRSPWNTPL | |
| | LPVKKPGTNDYRPVQDLREINKRVQDIHPTVPNPYNLLSSLPPSYTWY | |
| | SVLDLKDAFFCLRLHPNSQPLFAFEWKDPEKGNTGQLTWTRLPQGFKN | |
| | SPTLFDEALHRDLAPFRALNPQVVLLQYVDDLLVAAPTYEDCKKGTQK | |
| | LLQELSKLGYRVSAKKAQLCQREVTYLGYLLKEGKRWLTPARKATVMK | |
| | IPVPTTPRQVREFLGTAGFCRLWIPGFASLAAPLYPLTKESIPFIWTE | |
| | EHQQAFDHIKKALLSAPALALPDLTKPFTLYIDERAGVARGVLTQTLG | |
| | PWRRPVAYLSKKLDPVASGWPTCLKAVAAVALLLKDADKLTLGQNVTV | |
| | IASHSLESIVRQPPDRWMTNARMTHYQSLLLNERVSFAPPAVLNPATL | |
| | LPVESEATPVHRCSEILAEETGTRRDLEDQPLPGVPTWYTDGSSFITE | |
| | GKRRAGAPIVDGKRTVWASSLPEGTSAQKAELVALTQALRLAEGKNIN | |
| | IYTDSRYAFATAHIHGAIYKQRGLLTSAGKDIKNKEEILALLEAIHLP | |
| | RRVAIIHCPGHQRGSNPVATGNRRADEAAKQAALSTRVLAGTTKP | |
| GALV_P21414_ | VLNLEEEYRLHEKPVPSSIDPSWLQLFPTVWAERAGMGLANQVPPVVV | 355 |
| 3mut | ELRSGASPVAVRQYPMSKEAREGIRPHIQKFLDLGVLVPCRSPWNTPL | |
| | LPVKKPGTNDYRPVQDLREINKRVQDIHPTVPNPYNLLSSLPPSYTWY | |
| | SVLDLKDAFFCLRLHPNSQPLFAFEWKDPEKGNTGQLTWTRLPQGFKN | |
| | SPTLFNEALHRDLAPFRALNPQVVLLQYVDDLLVAAPTYEDCKKGTQK | |
| | LLQELSKLGYRVSAKKAQLCQREVTYLGYLLKEGKRWLTPARKATVMK | |
| | IPVPTTPRQVREFLGTAGFCRLWIPGFASLAAPLYPLTKPSIPFIWTE | |
| | EHQQAFDHIKKALLSAPALALPDLTKPFTLYIDERAGVARGVLTQTLG | |
| | PWRRPVAYLSKKLDPVASGWPTCLKAVAAVALLLKDADKLTLGQNVTV | |
| | IASHSLESIVRQPPDRWMTNARMTHYQSLLLNERVSFAPPAVLNPATL | |
| | LPVESEATPVHRCSEILAEETGTRRDLEDQPLPGVPTWYTDGSSFITE | |
| | GKRRAGAPIVDGKRTVWASSLPEGTSAQKAELVALTQALRLAEGKNIN | |
| | IYTDSRYAFATAHIHGAIYKQRGWLTSAGKDIKNKEEILALLEAIHLP | |
| | RRVAIIHCPGHQRGSNPVATGNRRADEAAKQAALSTRVLAGTTKP | |
| GALV_P21414_ | VLNLEEEYRLHEKPVPSSIDPSWLQLFPTVWAERAGMGLANQVPPVVV | 356 |
| 3mutA | ELRSGASPVAVRQYPMSKEAREGIRPHIQKFLDLGVLVPCRSPWNTPL | |
| | LPVKKPGTNDYRPVQDLREINKRVQDIHPTVPNPYNLLSSLPPSYTWY | |
| | SVLDLKDAFFCLRLHPNSQPLFAFEWKDPEKGNTGQLTWTRLPQGFKN | |
| | SPTLFNEALHRDLAPFRALNPQVVLLQYVDDLLVAAPTYEDCKKGTQK | |
| | LLQELSKLGYRVSAKKAQLCQREVTYLGYLLKEGKRWLTPARKATVMK | |
| | IPVPTTPRQVREFLGKAGFCRLFIPGFASLAAPLYPLTKPSIPFIWTE | |
| | EHQQAFDHIKKALLSAPALALPDLTKPFTLYIDERAGVARGVLTQTLG | |
| | PWRRPVAYLSKKLDPVASGWPTCLKAVAAVALLLKDADKLTLGQNVTV | |
| | IASHSLESIVRQPPDRWMTNARMTHYQSLLLNERVSFAPPAVLNPATL | |
| | LPVESEATPVHRCSEILAEETGTRRDLEDQPLPGVPTWYTDGSSFITE | |
| | GKRRAGAPIVDGKRTVWASSLPEGTSAQKAELVALTQALRLAEGKNIN | |
| | IYTDSRYAFATAHIHGAIYKQRGWLTSAGKDIKNKEEILALLEAIHLP | |
| | RRVAIIHCPGHQRGSNPVATGNRRADEAAKQAALSTRVLAGTTKP | |
| HTL1A_P03362 | AVLGLEHLPRPPQISQFPLNPERLQALQHLVRKALEAGHIEPYTGPGN | 357 |
| | NPVFPVKKANGTWRFIHDLRATNSLTIDLSSSSPGPPDLSSLPTTLAH | |
| | LQTIDLRDAFFQIPLPKQFQPYFAFTVPQQCNYGPGTRYAWKVLPQGF | |
| | KNSPTLFEMQLAHILQPIRQAFPQCTILQYMDDILLASPSHEDLLLLS | |
| | EATMASLISHGLPVSENKTQQTPGTIKFLGQIISPNHLTYDAVPTVPI | |
| | RSRWALPELQALLGEIQWVSKGTPTLRQPLHSLYCALQRHTDPRDQIY | |
| | LNPSQVQSLVQLRQALSQNCRSRLVQTLPLLGAIMLTLTGTTTVVFQS | |
| | KEQWPLVWLHAPLPHTSQCPWGQLLASAVLLLDKYTLQSYGLLCQTIH | |
| | HNISTQTFNQFIQTSDHPSVPILLHHSHRFKNLGAQTGELWNTFLKTA | |
| | APLAPVKALMPVFTLSPVIINTAPCLFSDGSTSRAAYILWDKQILSQR | |
| | SFPLPPPHKSAQRAELLGLLHGLSSARSWRCLNIFLDSKYLYHYLRTL | |
| | ALGTFQGRSSQAPFQALLPRLLSRKVVYLHHVRSHTNLPDPISRLNAL | |
| | TDALLITPVLQL | |
| HTL1A_P03362_ | AVLGLEHLPRPPQISQFPLNPERLQALQHLVRKALEAGHIEPYTGPGN | 358 |
| 2mut | NPVFPVKKANGTWRFIHDLRATNSLTIDLSSSSPGPPDLSSLPTTLAH | |
| | LQTIDLRDAFFQIPLPKQFQPYFAFTVPQQCNYGPGTRYAWKVLPQGF | |
| | KNSPTLFQMQLAHILQPIRQAFPQCTILQYMDDILLASPSHEDLLLLS | |
| | EATMASLISHGLPVSENKTQQTPGTIKFLGQIISPNHLTYDAVPTVPI | |
| | RSRWALPELQALLGEIQWVSKGTPTLRQPLHSLYCALQPHTDPRDQIY | |
| | LNPSQVQSLVQLRQALSQNCRSRLVQTLPLLGAIMLTLTGTTTVVFQS | |
| | KEQWPLVWLHAPLPHTSQCPWGQLLASAVLLLDKYTLQSYGLLCQTIH | |
| | HNISTQTFNQFIQTSDHPSVPILLHHSHRFKNLGAQTGELWNTFLKTA | |
| | APLAPVKALMPVFTLSPVIINTAPCLFSDGSTSRAAYILWDKQILSQR | |
| | SFPLPPPHKSAQRAELLGLLHGLSSARSWRCLNIFLDSKYLYHYLRTL | |
| | ALGTFQGRSSQAPFQALLPRLLSRKVVYLHHVRSHTNLPDPISRLNAL | |
| | TDALLITPVLQL | |
| HTL1A_P03362_ | AVLGLEHLPRPPQISQFPLNPERLQALQHLVRKALEAGHIEPYTGPGN | 359 |
| 2mutB | NPVFPVKKANGTWRFIHDLRATNSLTIDLSSSSPGPPDLSSPPTTLAH | |
| | LQTIDLRDAFFQIPLPKQFQPYFAFTVPQQCNYGPGTRYAWKVLPQGF | |
| | KNSPTLFQMQLAHILQPIRQAFPQCTILQYMDDILLASPSHEDLLLLS | |
| | EATMASLISHGLPVSENKTQQTPGTIKFLGQIISPNHLTYDAVPTVPI | |
| | RSRWALPELQALLGEIQWVSKGTPTLRQPLHSLYCALQPHTDPRDQIY | |
| | LNPSQVQSLVQLRQALSQNCRSRLVQTLPLLGAIMLTLTGTTTVVFQS | |
| | KEQWPLVWLHAPLPHTSQCPWGQLLASAVLLLDKYTLQSYGLLCQTIH | |
| | HNISTQTFNQFIQTSDHPSVPILLHHSHRFKNLGAQTGELWNTFLKTA | |
| | APLAPVKALMPVFTLSPVIINTAPCLFSDGSTSRAAYILWDKQILSQR | |
| | SFPLPPPHKSAQRAELLGLLHGLSSARSWRCLNIFLDSKYLYHYLRTL | |
| | ALGTFQGRSSQAPFQALLPRLLSRKVVYLHHVRSHTNLPDPISRLNAL | |
| | TDALLITPVLQL | |
| HTL1C_P14078 | AVLGLEHLPRPPEISQFPLNPERLQALQHLVRKALEAGHIEPYTGPGN | 360 |
| | NPVFPVKKANGTWRFIHDLRATNSLTIDLSSSSPGPPDLSSLPTTLAH | |
| | LQTIDLKDAFFQIPLPKQFQPYFAFTVPQQCNYGPGTRYAWRVLPQGF | |
| | KNSPTLFEMQLAHILQPIRQAFPQCTILQYMDDILLASPSHADLQLLS | |
| | EATMASLISHGLPVSENKTQQTPGTIKFLGQIISPNHLTYDAVPKVPI | |
| | RSRWALPELQALLGEIQWVSKGTPTLRQPLHSLYCALQRHTDPRDQIY | |
| | LNPSQVQSLVQLRQALSQNCRSRLVQTLPLLGAIMLTLTGTTTVVFQS | |
| | KQQWPLVWLHAPLPHTSQCPWGQLLASAVLLLDKYTLQSYGLLCQTIH | |
| | HNISTQTFNQFIQTSDHPSVPILLHHSHREKNLGAQTGELWNTFLKTT | |
| | APLAPVKALMPVFTLSPVIINTAPCLFSDGSTSQAAYILWDKHILSQR | |
| | SFPLPPPHKSAQRAELLGLLHGLSSARSWRCLNIFLDSKYLYHYLRTL | |
| | ALGTFQGRSSQAPFQALLPRLLSRKVVYLHHVRSHTNLPDPISRLNAL | |
| | TDALLITPVLQL | |
| HTL1C_P14078_ | AVLGLEHLPRPPEISQFPLNPERLQALQHLVRKALEAGHIEPYTGPGN | 361 |
| 2mut | NPVFPVKKANGTWRFIHDLRATNSLTIDLSSSSPGPPDLSSLPTTLAH | |
| | LQTIDLKDAFFQIPLPKQFQPYFAFTVPQQCNYGPGTRYAWRVLPQGF | |
| | KNSPTLFQMQLAHILQPIRQAFPQCTILQYMDDILLASPSHADLQLLS | |
| | EATMASLISHGLPVSENKTQQTPGTIKFLGQIISPNHLTYDAVPKVPI | |
| | RSRWALPELQALLGEIQWVSKGTPTLRQPLHSLYCALQPHTDPRDQIY | |
| | LNPSQVQSLVQLRQALSQNCRSRLVQTLPLLGAIMLTLTGTTTVVFQS | |
| | KQQWPLVWLHAPLPHTSQCPWGQLLASAVLLLDKYTLQSYGLLCQTIH | |
| | HNISTQTFNQFIQTSDHPSVPILLHHSHREKNLGAQTGELWNTFLKTT | |
| | APLAPVKALMPVFTLSPVIINTAPCLFSDGSTSQAAYILWDKHILSQR | |
| | SFPLPPPHKSAQRAELLGLLHGLSSARSWRCLNIFLDSKYLYHYLRTL | |
| | ALGTFQGRSSQAPFQALLPRLLSRKVVYLHHVRSHTNLPDPISRLNAL | |
| | TDALLITPVLQL | |
| HTL1L_P0C211 | GLEHLPRPPEISQFPLNPERLQALQHLVRKALEAGHIEPYTGPGNNPV | 362 |
| | FPVKKANGTWRFIHDLRATNSLTVDLSSSSPGPPDLSSLPTTLAHLQT | |
| | IDLKDAFFQIPLPKQFQPYFAFTVPQQCNYGPGTRYAWKVLPQGFKNS | |
| | PTLFEMQLASILQPIRQAFPQCVILQYMDDILLASPSPEDLQQLSEAT | |
| | MASLISHGLPVSQDKTQQTPGTIKFLGQIISPNHITYDAVPTVPIRSR | |
| | WALPELQALLGEIQWVSKGTPTLRQPLHSLYCALQGHTDPRDQIYLNP | |
| | SQVQSLMQLQQALSQNCRSRLAQTLPLLGAIMLTLTGTTTVVFQSKQQ | |
| | WPLVWLHAPLPHTSQCPWGQLLASAVLLLDKYTLQSYGLLCQTIHHNI | |
| | SIQTFNQFIQTSDHPSVPILLHHSHREKNLGAQTGELWNTFLKTAAPL | |
| | APVKALTPVFTLSPIIINTAPCLFSDGSTSQAAYILWDKHILSQRSFP | |
| | LPPPHKSAQQAELLGLLHGLSSARSWHCLNIFLDSKYLYHYLRTLALG | |
| | TFQGKSSQAPFQALLPRLLAHKVIYLHHVRSHINLPDPISKLNALTDA | |
| | LLITPIL | |
| HTL1L_P0C211_ | GLEHLPRPPEISQFPLNPERLQALQHLVRKALEAGHIEPYTGPGNNPV | 363 |
| 2mut | FPVKKANGTWRFIHDLRATNSLTVDLSSSSPGPPDLSSLPTTLAHLQT | |
| | IDLKDAFFQIPLPKQFQPYFAFTVPQQCNYGPGTRYAWKVLPQGFKNS | |
| | PTLFQMQLASILQPIRQAFPQCVILQYMDDILLASPSPEDLQQLSEAT | |
| | MASLISHGLPVSQDKTQQTPGTIKFLGQIISPNHITYDAVPTVPIRSR | |
| | WALPELQALLGEIQWVSKGTPTLRQPLHSLYCALQGHTDPRDQIYLNP | |
| | SQVQSLMQLQQALSQNCRSRLAQTLPLLGAIMLTLTGTTTVVFQSKQQ | |
| | WPLVWLHAPLPHTSQCPWGQLLASAVLLLDKYTLQSYGLLCQTIHHNI | |
| | SIQTFNQFIQTSDHPSVPILLHHSHRFKNLGAQTGELWNTFLKTAAPL | |
| | APVKALTPVFTLSPIIINTAPCLFSDGSTSQAAYILWDKHILSQRSFP | |
| | LPPPHKSAQQAELLGLLHGLSSARSWHCLNIFLDSKYLYHYLRTLAWG | |
| | TFQGKSSQAPFQALLPRLLAHKVIYLHHVRSHTNLPDPISKLNALTDA | |
| | LLITPIL | |
| HTL1L_P0C211_ | GLEHLPRPPEISQFPLNPERLQALQHLVRKALEAGHIEPYTGPGNNPV | 364 |
| 2mutB | FPVKKANGTWRFIHDLRATNSLTVDLSSSSPGPPDLSSPPTTLAHLQT | |
| | IDLKDAFFQIPLPKQFQPYFAFTVPQQCNYGPGTRYAWKVLPQGFKNS | |
| | PTLFQMQLASILQPIRQAFPQCVILQYMDDILLASPSPEDLQQLSEAT | |
| | MASLISHGLPVSQDKTQQTPGTIKFLGQIISPNHITYDAVPTVPIRSR | |
| | WALPELQALLGEIQWVSKGTPTLRQPLHSLYCALQGHTDPRDQIYLNP | |
| | SQVQSLMQLQQALSQNCRSRLAQTLPLLGAIMLTLTGTTTVVFQSKQQ | |
| | WPLVWLHAPLPHTSQCPWGQLLASAVLLLDKYTLQSYGLLCQTIHHNI | |
| | SIQTFNQFIQTSDHPSVPILLHHSHRFKNLGAQTGELWNTFLKTAAPL | |
| | APVKALTPVFTLSPIIINTAPCLFSDGSTSQAAYILWDKHILSQRSFP | |
| | LPPPHKSAQQAELLGLLHGLSSARSWHCLNIFLDSKYLYHYLRTLAWG | |
| | TFQGKSSQAPFQALLPRLLAHKVIYLHHVRSHTNLPDPISKLNALTDA | |
| | LLITPIL | |
| HTL32_Q0R5R2_ | GLEHLPPPPEVSQFPLNPERLQALTDLVSRALEAKHIEPYQGPGNNPI | 365 |
| | FPVKKPNGKWRFIHDLRATNSVTRDLASPSPGPPDLTSLPQGLPHLRT | |
| | IDLTDAFFQIPLPTIFQPYFAFTLPQPNNYGPGTRYSWRVLPQGFKNS | |
| | PTLFEQQLSHILTPVRKTFPNSLIIQYMDDILLASPAPGELAALTDKV | |
| | TNALTKEGLPLSPEKTQATPGPIHFLGQVISQDCITYETLPSINVKST | |
| | WSLAELQSMLGELQWVSKGTPVLRSSLHQLYLALRGHRDPRDTIKLTS | |
| | IQVQALRTIQKALTLNCRSRLVNQLPILALIMLRPTGTTAVLFQTKQK | |
| | WPLVWLHTPHPATSLRPWGQLLANAVIILDKYSLQHYGQVCKSFHHNI | |
| | SNQALTYYLHTSDQSSVAILLQHSHRFHNLGAQPSGPWRSLLQMPQIF | |
| | QNIDVLRPPFTISPVVINHAPCLFSDGSASKAAFIIWDRQVIHQQVLS | |
| | LPSTCSAQAGELFGLLAGLQKSQPWVALNIFLDSKFLIGHLRRMALGA | |
| | FPGPSTQCELHTQLLPLLQGKTVYVHHVRSHTLLQDPISRLNEATDAL | |
| | MLAPLLPL | |
| HTL32_Q0R5R2_ | GLEHLPPPPEVSQFPLNPERLQALTDLVSRALEAKHIEPYQGPGNNPI | 366 |
| 2mut | FPVKKPNGKWRFIHDLRATNSVTRDLASPSPGPPDLTSLPQGLPHLRT | |
| | IDLTDAFFQIPLPTIFQPYFAFTLPQPNNYGPGTRYSWRVLPQGFKNS | |
| | PTLFQQQLSHILTPVRKTFPNSLIIQYMDDILLASPAPGELAALTDKV | |
| | TNALTKEGLPLSPEKTQATPGPIHFLGQVISQDCITYETLPSINVKST | |
| | WSLAELQSMLGELQWVSKGTPVLRSSLHQLYLALRGHRDPRDTIKLTS | |
| | IQVQALRTIQKALTLNCRSRLVNQLPILALIMLRPTGTTAVLFQTKQK | |
| | WPLVWLHTPHPATSLRPWGQLLANAVIILDKYSLQHYGQVCKSFHHNI | |
| | SNQALTYYLHTSDQSSVAILLQHSHRFHNLGAQPSGPWRSLLQMPQIF | |
| | QNIDVLRPPFTISPVVINHAPCLFSDGSASKAAFIIWDRQVIHQQVLS | |
| | LPSTCSAQAGELFGLLAGLQKSQPWVALNIFLDSKFLIGHLRRMAWGA | |
| | FPGPSTQCELHTQLLPLLQGKTVYVHHVRSHTLLQDPISRLNEATDAL | |
| | MLAPLLPL | |
| HTL32_Q0R5R2_ | GLEHLPPPPEVSQFPLNPERLQALTDLVSRALEAKHIEPYQGPGNNPI | 367 |
| 2mutB | FPVKKPNGKWRFIHDLRATNSVTRDLASPSPGPPDLTSPPQGLPHLRT | |
| | IDLTDAFFQIPLPTIFQPYFAFTLPQPNNYGPGTRYSWRVLPQGFKNS | |
| | PTLFQQQLSHILTPVRKTFPNSLIIQYMDDILLASPAPGELAALTDKV | |
| | TNALTKEGLPLSPEKTQATPGPIHFLGQVISQDCITYETLPSINVKST | |
| | WSLAELQSMLGELQWVSKGTPVLRSSLHQLYLALRGHRDPRDTIKLTS | |
| | IQVQALRTIQKALTLNCRSRLVNQLPILALIMLRPTGTTAVLFQTKQK | |
| | WPLVWLHTPHPATSLRPWGQLLANAVIILDKYSLQHYGQVCKSFHHNI | |
| | SNQALTYYLHTSDQSSVAILLQHSHRFHNLGAQPSGPWRSLLQMPQIF | |
| | QNIDVLRPPFTISPVVINHAPCLFSDGSASKAAFIIWDRQVIHQQVLS | |
| | LPSTCSAQAGELFGLLAGLQKSQPWVALNIFLDSKFLIGHLRRMAWGA | |
| | FPGPSTQCELHTQLLPLLQGKTVYVHHVRSHTLLQDPISRLNEATDAL | |
| | MLAPLLPL | |
| HTL3P_Q4U0X6 | GLEHLPPPPEVSQFPLNPERLQALTDLVSRALEAKHIEPYQGPGNNPI | 368 |
| | FPVKKPNGKWRFIHDLRATNSLTRDLASPSPGPPDLTSLPQDLPHLRT | |
| | IDLTDAFFQIPLPAVFQPYFAFTLPQPNNHGPGTRYSWRVLPQGFKNS | |
| | PTLFEQQLSHILAPVRKAFPNSLIIQYMDDILLASPALRELTALTDKV | |
| | TNALTKEGLPMSLEKTQATPGSIHFLGQVISPDCITYETLPSIHVKSI | |
| | WSLAELQSMLGELQWVSKGTPVLRSSLHQLYLALRGHRDPRDTIELTS | |
| | TQVQALKTIQKALALNCRSRLVSQLPILALIILRPTGTTAVLFQTKQK | |
| | WPLVWLHTPHPATSLRPWGQLLANAIITLDKYSLQHYGQICKSFHHNI | |
| | SNQALTYYLHTSDQSSVAILLQHSHRFHNLGAQPSGPWRSLLQVPQIF | |
| | QNIDVLRPPFIISPVVIDHAPCLFSDGATSKAAFILWDKQVIHQQVLP | |
| | LPSTCSAQAGELFGLLAGLQKSKPWPALNIFLDSKFLIGHLRRMALGA | |
| | FLGPSTQCDLHARLFPLLQGKTVYVHHVRSHTLLQDPISRLNEATDAL | |
| | MLAPLLPL | |
| HTL3P_Q4U0X6_ | GLEHLPPPPEVSQFPLNPERLQALTDLVSRALEAKHIEPYQGPGNNPI | 369 |
| 2mut | FPVKKPNGKWRFIHDLRATNSLTRDLASPSPGPPDLTSLPQDLPHLRT | |
| | IDLTDAFFQIPLPAVFQPYFAFTLPQPNNHGPGTRYSWRVLPQGFKNS | |
| | PTLFQQQLSHILAPVRKAFPNSLIIQYMDDILLASPALRELTALTDKV | |
| | TNALTKEGLPMSLEKTQATPGSIHFLGQVISPDCITYETLPSIHVKSI | |
| | WSLAELQSMLGELQWVSKGTPVLRSSLHQLYLALRGHRDPRDTIELTS | |
| | TQVQALKTIQKALALNCRSRLVSQLPILALIILRPTGTTAVLFQTKQK | |
| | WPLVWLHTPHPATSLRPWGQLLANAIITLDKYSLQHYGQICKSFHHNI | |
| | SNQALTYYLHTSDQSSVAILLQHSHRFHNLGAQPSGPWRSLLQVPQIF | |
| | QNIDVLRPPFIISPVVIDHAPCLFSDGATSKAAFILWDKQVIHQQVLP | |
| | LPSTCSAQAGELFGLLAGLQKSKPWPALNIFLDSKFLIGHLRRMAWGA | |
| | FLGPSTQCDLHARLFPLLQGKTVYVHHVRSHTLLQDPISRLNEATDAL | |
| | MLAPLLPL | |
| HTL3P_Q4U0X6_ | GLEHLPPPPEVSQFPLNPERLQALTDLVSRALEAKHIEPYQGPGNNPI | 370 |
| 2mutB | FPVKKPNGKWRFIHDLRATNSLTRDLASPSPGPPDLTSPPQDLPHLRT | |
| | IDLTDAFFQIPLPAVFQPYFAFTLPQPNNHGPGTRYSWRVLPQGFKNS | |
| | PTLFQQQLSHILAPVRKAFPNSLIIQYMDDILLASPALRELTALTDKV | |
| | TNALTKEGLPMSLEKTQATPGSIHFLGQVISPDCITYETLPSIHVKSI | |
| | WSLAELQSMLGELQWVSKGTPVLRSSLHQLYLALRGHRDPRDTIELTS | |
| | TQVQALKTIQKALALNCRSRLVSQLPILALIILRPTGTTAVLFQTKQK | |
| | WPLVWLHTPHPATSLRPWGQLLANAIITLDKYSLQHYGQICKSFHHNI | |
| | SNQALTYYLHTSDQSSVAILLQHSHRFHNLGAQPSGPWRSLLQVPQIF | |
| | QNIDVLRPPFIISPVVIDHAPCLFSDGATSKAAFILWDKQVIHQQVLP | |
| | LPSTCSAQAGELFGLLAGLQKSKPWPALNIFLDSKFLIGHLRRMAWGA | |
| | FLGPSTQCDLHARLFPLLQGKTVYVHHVRSHTLLQDPISRLNEATDAL | |
| | MLAPLLPL | |
| HTLV2_P03363_ | HLPPPPQVDQFPLNLPERLQALNDLVSKALEAGHIEPYSGPGNNPVFP | 371 |
| 2mut | VKKPNGKWRFIHDLRATNAITTTLTSPSPGPPDLTSLPTALPHLQTID | |
| | LTDAFFQIPLPKQYQPYFAFTIPQPCNYGPGTRYAWTVLPQGFKNSPT | |
| | LFQQQLAAVLNPMRKMFPTSTIVQYMDDILLASPTNEELQQLSQLTLQ | |
| | ALTTHGLPISQEKTQQTPGQIRFLGQVISPNHITYESTPTIPIKSQWT | |
| | LTELQVILGEIQWVSKGTPILRKHLQSLYSALHPYRDPRACITLTPQQ | |
| | LHALHAIQQALQHNCRGRLNPALPLLGLISLSTSGTTSVIFQPKQNWP | |
| | LAWLHTPHPPTSLCPWGHLLACTILTLDKYTLQHYGQLCQSFHHNMSK | |
| | QALCDFLRNSPHPSVGILIHHMGRFHNLGSQPSGPWKTLLHLPTLLQE | |
| | PRLLRPIFTLSPVVLDTAPCLFSDGSPQKAAYVLWDQTILQQDITPLP | |
| | SHETHSAQKGELLALICGLRAAKPWPSLNIFLDSKYLIKYLHSLAIGA | |
| | FLGTSAHQTLQAALPPLLQGKTIYLHHVRSHTNLPDPISTFNEYTDSL | |
| | ILAPLVPL | |
| JSRV_P31623 | PLGTSDSPVTHADPIDWKSEEPVWVDQWPLTQEKLSAAQQLVQEQLRL | 372 |
| | GHIEPSTSAWNSPIFVIKKKSGKWRLLQDLRKVNETMMHMGALQPGLP | |
| | TPSAIPDKSYIIVIDLKDCFYTIPLAPQDCKRFAFSLPSVNFKEPMQR | |
| | YQWRVLPQGMTNSPTLCQKFVATAIAPVRQRFPQLYLVHYMDDILLAH | |
| | TDEHLLYQAFSILKQHLSLNGLVIADEKIQTHFPYNYLGFSLYPRVYN | |
| | TQLVKLQTDHLKTLNDFQKLLGDINWIRPYLKLPTYTLQPLFDILKGD | |
| | SDPASPRTLSLEGRTALQSIEEAIRQQQITYCDYQRSWGLYILPTPRA | |
| | PTGVLYQDKPLRWIYLSATPTKHLLPYYELVAKIIAKGRHEAIQYFGM | |
| | EPPFICVPYALEQQDWLFQFSDNWSIAFANYPGQITHHYPSDKLLQFA | |
| | SSHAFIFPKIVRRQPIPEATLIFTDGSSNGTAALIINHQTYYAQTSFS | |
| | SAQVVELFAVHQALLTVPTSFNLFTDSSYVVGALQMIETVPIIGTTSP | |
| | EVLNLFTLIQQVLHCRQHPCFFGHIRAHSTLPGALVQGNHTADVLTKQ | |
| | VFFQS | |
| JSRV_P31623_ | PLGTSDSPVTHADPIDWKSEEPVWVDQWPLTQEKLSAAQQLVQEQLRL | 373 |
| 2mutB | GHIEPSTSAWNSPIFVIKKKSGKWRLLQDLRKVNETMMHMGALQPGLP | |
| | TPSPIPDKSYIIVIDLKDCFYTIPLAPQDCKRFAFSLPSVNFKEPMQR | |
| | YQWRVLPQGMTNSPTLCQKFVATAIAPVRQRFPQLYLVHYMDDILLAH | |
| | TDEHLLYQAFSILKQHLSLNGLVIADEKIQTHEPYNYLGFSLYPRVYN | |
| | TQLVKLQTDHLKTLNDFQKLLGDINWIRPYLKLPTYTLQPLFDILKGD | |
| | SDPASPRTLSLEGRTALQSIEEAIRQQQITYCDYQRSWGLYILPTPRA | |
| | PTGVLYQDKPLRWIYLSATPTKHLLPYYELVAKIIAKGRHEAIQYFGM | |
| | EPPFICVPYALEQQDWLFQFSDNWSIAFANYPGQITHHYPSDKLLQFA | |
| | SSHAFIFPKIVRRQPIPEATLIFTDGSSNGTAALIINHQTYYAQTSFS | |
| | SAQVVELFAVHQALLTVPTSFNLFTDSSYVVGALQMIETVPIIGTTSP | |
| | EVLNLFTLIQQVLHCRQHPCFFGHIRAHSTLPGALVQGNHTADVLTKQ | |
| | VFFQS | |
| KORV_Q9TTC1 | TLGDQGSRGSDPLPEPRVTLTVEGIPTEFLVNTGAEHSVLTKPMGKMG | 374 |
| | SKRTVVAGATGSKVYPWTTKRLLKIGQKQVTHSFLVIPECPAPLLGRD | |
| | LLTKLKAQIQFSTEGPQVTWEDRPAMCLVLNLEEEYRLHEKPVPPSID | |
| | PSWLQLFPMVWAEKAGMGLANQVPPVVVELKSDASPVAVRQYPMSKEA | |
| | REGIRPHIQRFLDLGILVPCQSPWNTPLLPVKKPGTNDYRPVQDLREV | |
| | NKRVQDIHPTVPNPYNLLSSLPPSHTWYSVLDLKDAFFCLKLHPNSQP | |
| | LFAFEWRDPEKGNTGQLTWTRLPQGFKNSPTLFDEALHRDLASFRALN | |
| | PQVVMLQYVDDLLVAAPTYRDCKEGTRRLLQELSKLGYRVSAKKAQLC | |
| | REEVTYLGYLLKGGKRWLTPARKATVMKIPTPTTPRQVREFLGTAGFC | |
| | RLWIPGFASLAAPLYPLTREKVPFTWTEAHQEAFGRIKEALLSAPALA | |
| | LPDLTKPFALYVDEKEGVARGVLTQTLGPWRRPVAYLSKKLDPVASGW | |
| | PTCLKAIAAVALLLKDADKLTLGQNVLVIAPHNLESIVRQPPDRWMTN | |
| | ARMTHYQSLLLNERVSFAPPAILNPATLLPVESDDTPIHICSEILAEE | |
| | TGTRPDLRDQPLPGVPAWYTDGSSFIMDGRRQAGAAIVDNKRTVWASN | |
| | LPEGTSAQKAELIALTQALRLAEGKSINIYTDSRYAFATAHVHGAIYK | |
| | QRGLLTSAGKDIKNKEEILALLEAIHLPKRVAIIHCPGHQRGTDPVAT | |
| | GNRKADEAAKQAAQSTRILTETTKN | |
| KORV_Q9TTC1_ | TLGDQGSRGSDPLPEPRVTLTVEGIPTEFLVNTGAEHSVLTKPMGKMG | 375 |
| 3mut | SKRTVVAGATGSKVYPWTTKRLLKIGQKQVTHSFLVIPECPAPLLGRD | |
| | LLTKLKAQIQFSTEGPQVTWEDRPAMCLVLNLEEEYRLHEKPVPPSID | |
| | PSWLQLFPMVWAEKAGMGLANQVPPVVVELKSDASPVAVRQYPMSKEA | |
| | REGIRPHIQRFLDLGILVPCQSPWNTPLLPVKKPGTNDYRPVQDLREV | |
| | NKRVQDIHPTVPNPYNLLSSLPPSHTWYSVLDLKDAFFCLKLHPNSQP | |
| | LFAFEWRDPEKGNTGQLTWTRLPQGFKNSPTLFNEALHRDLASFRALN | |
| | PQVVMLQYVDDLLVAAPTYRDCKEGTRRLLQELSKLGYRVSAKKAQLC | |
| | REEVTYLGYLLKGGKRWLTPARKATVMKIPTPTTPRQVREFLGTAGFC | |
| | RLWIPGFASLAAPLYPLTRPKVPFTWTEAHQEAFGRIKEALLSAPALA | |
| | LPDLTKPFALYVDEKEGVARGVLTQTLGPWRRPVAYLSKKLDPVASGW | |
| | PTCLKAIAAVALLLKDADKLTLGQNVLVIAPHNLESIVRQPPDRWMIN | |
| | ARMTHYQSLLLNERVSFAPPAILNPATLLPVESDDTPIHICSEILAEE | |
| | TGTRPDLRDQPLPGVPAWYTDGSSFIMDGRRQAGAAIVDNKRTVWASN | |
| | LPEGTSAQKAELIALTQALRLAEGKSINIYTDSRYAFATAHVHGAIYK | |
| | QRGWLTSAGKDIKNKEEILALLEAIHLPKRVAIIHCPGHQRGTDPVAT | |
| | GNRKADEAAKQAAQSTRILTETTKN | |
| KORV_Q9TTC1_ | TLGDQGSRGSDPLPEPRVTLTVEGIPTEFLVNTGAEHSVLTKPMGKMG | 376 |
| 3mutA | SKRTVVAGATGSKVYPWTTKRLLKIGQKQVTHSFLVIPECPAPLLGRD | |
| | LLTKLKAQIQFSTEGPQVTWEDRPAMCLVLNLEEEYRLHEKPVPPSID | |
| | PSWLQLFPMVWAEKAGMGLANQVPPVVVELKSDASPVAVRQYPMSKEA | |
| | REGIRPHIQRFLDLGILVPCQSPWNTPLLPVKKPGTNDYRPVQDLREV | |
| | NKRVQDIHPTVPNPYNLLSSLPPSHTWYSVLDLKDAFFCLKLHPNSQP | |
| | LFAFEWRDPEKGNTGQLTWTRLPQGFKNSPTLFNEALHRDLASFRALN | |
| | PQVVMLQYVDDLLVAAPTYRDCKEGTRRLLQELSKLGYRVSAKKAQLC | |
| | REEVTYLGYLLKGGKRWLTPARKATVMKIPTPTTPRQVREFLGKAGFC | |
| | RLFIPGFASLAAPLYPLTRPKVPFTWTEAHQEAFGRIKEALLSAPALA | |
| | LPDLTKPFALYVDEKEGVARGVLTQTLGPWRRPVAYLSKKLDPVASGW | |
| | PTCLKAIAAVALLLKDADKLTLGQNVLVIAPHNLESIVRQPPDRWMTN | |
| | ARMTHYQSLLLNERVSFAPPAILNPATLLPVESDDTPIHICSEILAEE | |
| | TGTRPDLRDQPLPGVPAWYTDGSSFIMDGRRQAGAAIVDNKRTVWASN | |
| | LPEGTSAQKAELIALTQALRLAEGKSINIYTDSRYAFATAHVHGAIYK | |
| | QRGWLTSAGKDIKNKEEILALLEAIHLPKRVAIIHCPGHQRGTDPVAT | |
| | GNRKADEAAKQAAQSTRILTETTKN | |
| KORV_Q9TTC1- | LLGRDLLTKLKAQIQFSTEGPQVTWEDRPAMCLVLNLEEEYRLHEKPV | 377 |
| Pro | PPSIDPSWLQLFPMVWAEKAGMGLANQVPPVVVELKSDASPVAVRQYP | |
| | MSKEAREGIRPHIQRFLDLGILVPCQSPWNTPLLPVKKPGTNDYRPVQ | |
| | DLREVNKRVQDIHPTVPNPYNLLSSLPPSHTWYSVLDLKDAFFCLKLH | |
| | PNSQPLFAFEWRDPEKGNTGQLTWTRLPQGFKNSPTLFDEALHRDLAS | |
| | FRALNPQVVMLQYVDDLLVAAPTYRDCKEGTRRLLQELSKLGYRVSAK | |
| | KAQLCREEVTYLGYLLKGGKRWLTPARKATVMKIPTPTTPRQVREFLG | |
| | TAGFCRLWIPGFASLAAPLYPLTREKVPFTWTEAHQEAFGRIKEALLS | |
| | APALALPDLTKPFALYVDEKEGVARGVLTQTLGPWRRPVAYLSKKLDP | |
| | VASGWPTCLKAIAAVALLLKDADKLTLGQNVLVIAPHNLESIVRQPPD | |
| | RWMTNARMTHYQSLLLNERVSFAPPAILNPATLLPVESDDTPIHICSE | |
| | ILAEETGTRPDLRDQPLPGVPAWYTDGSSFIMDGRRQAGAAIVDNKRT | |
| | VWASNLPEGTSAQKAELIALTQALRLAEGKSINIYTDSRYAFATAHVH | |
| | GAIYKQRGLLTSAGKDIKNKEEILALLEAIHLPKRVAIIHCPGHQRGT | |
| | DPVATGNRKADEAAKQAAQSTRILTETTKN | |
| KORV_Q9TTC1- | LLGRDLLTKLKAQIQFSTEGPQVTWEDRPAMCLVLNLEEEYRLHEKPV | 378 |
| Pro_3mut | PPSIDPSWLQLFPMVWAEKAGMGLANQVPPVVVELKSDASPVAVRQYP | |
| | MSKEAREGIRPHIQRFLDLGILVPCQSPWNTPLLPVKKPGTNDYRPVQ | |
| | DLREVNKRVQDIHPTVPNPYNLLSSLPPSHTWYSVLDLKDAFFCLKLH | |
| | PNSQPLFAFEWRDPEKGNTGQLTWTRLPQGFKNSPTLFNEALHRDLAS | |
| | FRALNPQVVMLQYVDDLLVAAPTYRDCKEGTRRLLQELSKLGYRVSAK | |
| | KAQLCREEVTYLGYLLKGGKRWLTPARKATVMKIPTPTTPRQVREFLG | |
| | TAGFCRLWIPGFASLAAPLYPLTRPKVPFTWTEAHQEAFGRIKEALLS | |
| | APALALPDLTKPFALYVDEKEGVARGVLTQTLGPWRRPVAYLSKKLDP | |
| | VASGWPTCLKAIAAVALLLKDADKLTLGQNVLVIAPHNLESIVRQPPD | |
| | RWMTNARMTHYQSLLLNERVSFAPPAILNPATLLPVESDDTPIHICSE | |
| | ILAEETGTRPDLRDQPLPGVPAWYTDGSSFIMDGRRQAGAAIVDNKRT | |
| | VWASNLPEGTSAQKAELIALTQALRLAEGKSINIYTDSRYAFATAHVH | |
| | GAIYKQRGWLTSAGKDIKNKEEILALLEAIHLPKRVAIIHCPGHQRGT | |
| | DPVATGNRKADEAAKQAAQSTRILTETTKN | |
| KORV_Q9TTC1- | LLGRDLLTKLKAQIQFSTEGPQVTWEDRPAMCLVLNLEEEYRLHEKPV | 379 |
| Pro_3mutA | PPSIDPSWLQLFPMVWAEKAGMGLANQVPPVVVELKSDASPVAVRQYP | |
| | MSKEAREGIRPHIQRFLDLGILVPCQSPWNTPLLPVKKPGTNDYRPVQ | |
| | DLREVNKRVQDIHPTVPNPYNLLSSLPPSHTWYSVLDLKDAFFCLKLH | |
| | PNSQPLFAFEWRDPEKGNTGQLTWTRLPQGFKNSPTLFNEALHRDLAS | |
| | FRALNPQVVMLQYVDDLLVAAPTYRDCKEGTRRLLQELSKLGYRVSAK | |
| | KAQLCREEVTYLGYLLKGGKRWLTPARKATVMKIPTPTTPRQVREFLG | |
| | KAGFCRLFIPGFASLAAPLYPLTRPKVPFTWTEAHQEAFGRIKEALLS | |
| | APALALPDLTKPFALYVDEKEGVARGVLTQTLGPWRRPVAYLSKKLDP | |
| | VASGWPTCLKAIAAVALLLKDADKLTLGQNVLVIAPHNLESIVRQPPD | |
| | RWMTNARMTHYQSLLLNERVSFAPPAILNPATLLPVESDDTPIHICSE | |
| | ILAEETGTRPDLRDQPLPGVPAWYTDGSSFIMDGRRQAGAAIVDNKRT | |
| | VWASNLPEGTSAQKAELIALTQALRLAEGKSINIYTDSRYAFATAHVH | |
| | GAIYKQRGWLTSAGKDIKNKEEILALLEAIHLPKRVAIIHCPGHQRGT | |
| | DPVATGNRKADEAAKQAAQSTRILTETTKN | |
| MLVAV_P03356 | TLNLEDEYRLYETSAEPEVSPGSTWLSDFPQAWAETGGMGLAVRQAPL | 380 |
| | IIPLKATSTPVSIKQYPMSQEAKLGIKPHIQRLLDQGILVPCQSPWNT | |
| | PLLPVKKPGTNDYRPVQDLREVNKRVEDIHPTVPNPYNLLSGLPPSHR | |
| | WYTVLDLKDAFFCLRLHPTSQPLFAFEWRDPGMGISGQLTWTRLPQGF | |
| | KNSPTLFDEALHRDLADFRIQHPDLILLQYVDDILLAATSELDCQQGT | |
| | RALLLTLGNLGYRASAKKAQLCQKQVKYLGYLLKEGQRWLTEARKETV | |
| | MGQPTPKTPRQLREFLGTAGFCRLWIPGFAEMAAPLYPLTKTGTLENW | |
| | GPDQQKAYQEIKQALLTAPALGLPDLTKPFELFVDEKQGYAKGVLTQK | |
| | LGPWRRPVAYLSKKLDPVAAGWPPCLRMVAAIAVLRKDAGKLTMGQPL | |
| | VILAPHAVEALVKQPPDRWLSNARMTHYQAMLLDTDRVQFGPVVALNP | |
| | ATLLPLPEEGAPHDCLEILAETHGTRPDLTDQPIPDADHTWYTDGSSF | |
| | LQEGQRKAGAAVTTETEVIWARALPAGTSAQRAELIALTQALKMAEGK | |
| | RLNVYTDSRYAFATAHIHGEIYRRRGLLTSEGREIKNKSEILALLKAL | |
| | FLPKRLSIIHCLGHQKGDSAEARGNRLADQAAREAAIKTPPDTSTLL | |
| MLVAV_P03356_ | TLNLEDEYRLYETSAEPEVSPGSTWLSDFPQAWAETGGMGLAVRQAPL | 381 |
| 3mut | IIPLKATSTPVSIKQYPMSQEAKLGIKPHIQRLLDQGILVPCQSPWNT | |
| | PLLPVKKPGTNDYRPVQDLREVNKRVEDIHPTVPNPYNLLSGLPPSHR | |
| | WYTVLDLKDAFFCLRLHPTSQPLFAFEWRDPGMGISGQLTWTRLPQGF | |
| | KNSPTLFNEALHRDLADFRIQHPDLILLQYVDDILLAATSELDCQQGT | |
| | RALLLTLGNLGYRASAKKAQLCQKQVKYLGYLLKEGQRWLTEARKETV | |
| | MGQPTPKTPRQLREFLGTAGFCRLWIPGFAEMAAPLYPLTKPGTLFNW | |
| | GPDQQKAYQEIKQALLTAPALGLPDLTKPFELFVDEKQGYAKGVLTQK | |
| | LGPWRRPVAYLSKKLDPVAAGWPPCLRMVAAIAVLRKDAGKLTMGQPL | |
| | VILAPHAVEALVKQPPDRWLSNARMTHYQAMLLDTDRVQFGPVVALNP | |
| | ATLLPLPEEGAPHDCLEILAETHGTRPDLTDQPIPDADHTWYTDGSSF | |
| | LQEGQRKAGAAVTTETEVIWARALPAGTSAQRAELIALTQALKMAEGK | |
| | RLNVYTDSRYAFATAHIHGEIYRRRGWLTSEGREIKNKSEILALLKAL | |
| | FLPKRLSIIHCLGHQKGDSAEARGNRLADQAAREAAIKTPPDTSTLL | |
| MLVAV_P03356_ | TLNLEDEYRLYETSAEPEVSPGSTWLSDFPQAWAETGGMGLAVRQAPL | 382 |
| 3mutA | IIPLKATSTPVSIKQYPMSQEAKLGIKPHIQRLLDQGILVPCQSPWNT | |
| | PLLPVKKPGTNDYRPVQDLREVNKRVEDIHPTVPNPYNLLSGLPPSHR | |
| | WYTVLDLKDAFFCLRLHPTSQPLFAFEWRDPGMGISGQLTWTRLPQGF | |
| | KNSPTLFNEALHRDLADFRIQHPDLILLQYVDDILLAATSELDCQQGT | |
| | RALLLTLGNLGYRASAKKAQLCQKQVKYLGYLLKEGQRWLTEARKETV | |
| | MGQPTPKTPRQLREFLGKAGFCRLFIPGFAEMAAPLYPLTKPGTLENW | |
| | GPDQQKAYQEIKQALLTAPALGLPDLTKPFELFVDEKQGYAKGVLTQK | |
| | LGPWRRPVAYLSKKLDPVAAGWPPCLRMVAAIAVLRKDAGKLTMGQPL | |
| | VILAPHAVEALVKQPPDRWLSNARMTHYQAMLLDTDRVQFGPVVALNP | |
| | ATLLPLPEEGAPHDCLEILAETHGTRPDLTDQPIPDADHTWYTDGSSF | |
| | LQEGQRKAGAAVTTETEVIWARALPAGTSAQRAELIALTQALKMAEGK | |
| | RLNVYTDSRYAFATAHIHGEIYRRRGWLTSEGREIKNKSEILALLKAL | |
| | FLPKRLSIIHCLGHQKGDSAEARGNRLADQAAREAAIKTPPDTSTLL | |
| MLVBM_Q7SVK7 | TLGIEDEYRLHETSTEPDVSLGSTWLSDFPQAWAETGGMGLAVRQAPL | 383 |
| | IIPLKATSTPVSIQQYPMSHEARLGIKPHIQRLLDQGILVPCQSPWNT | |
| | PLLPVKKPGTNDYRPVQDLREVNKRVEDIHPTVPNPYNLLSGLPPSHQ | |
| | WYTVLDLKDAFFCLRLHPTSQPLFAFEWRDPGMGISGQLTWTRLPQGF | |
| | KNSPTLFDEALHRDLADFRIQHPDLILLQYVDDILLAATSELDCQQGT | |
| | RALLQTLGDLGYRASAKKAQICQKQVKYLGYLLREGQRWLTEARKETV | |
| | MGQPVPKTPRQLREFLGTAGFCRLWIPGFAEMAAPLYPLTKTGTLFSW | |
| | GPDQQKAYQEIKQALLTAPALGLPDLTKPFELFVDEKQGYAKGVLTQK | |
| | LGPWRRPVAYLSKKLDPVAAGWPPCLRMVAAIAVLTKDAGKLTMGQPL | |
| | VILAPHAVEALVKQPPDRWLSNARMTHYQAMLLDTDRVQFGPVVALNP | |
| | ATLLPLPEEGAPHDCLEILAETHGTRPDLTDQPIPDADHTWYTDGSSF | |
| | LQEGQRKAGAAVTTETEVIWAGALPAGTSAQRAELIALTQALKMAEGK | |
| | RLNVYTDSRYAFATAHIHGEIYRRRGLLTSEGREIKNKSEILALLKAL | |
| | FLPKRLSIIHCLGHQKGDSAEARGNRLADQAAREAAIKTPPDTSTLL | |
| MLVBM_Q7SVK7 | TLGIEDEYRLHETSTEPDVSLGSTWLSDFPQAWAETGGMGLAVRQAPL | 384 |
| | IIPLKATSTPVSIQQYPMSHEARLGIKPHIQRLLDQGILVPCQSPWNT | |
| | PLLPVKKPGTNDYRPVQDLREVNKRVEDIHPTVPNPYNLLSGLPPSHQ | |
| | WYTVLDLKDAFFCLRLHPTSQPLFAFEWRDPGMGISGQLTWTRLPQGF | |
| | KNSPTLFDEALHRDLADFRIQHPDLILLQYVDDILLAATSELDCQQGT | |
| | RALLQTLGDLGYRASAKKAQICQKQVKYLGYLLREGQRWLTEARKETV | |
| | MGQPVPKTPRQLREFLGTAGFCRLWIPGFAEMAAPLYPLTKTGTLFSW | |
| | GPDQQKAYQEIKQALLTAPALGLPDLTKPFELFVDEKQGYAKGVLTQK | |
| | LGPWRRPVAYLSKKLDPVAAGWPPCLRMVAAIAVLTKDAGKLTMGQPL | |
| | VILAPHAVEALVKQPPDRWLSNARMTHYQAMLLDTDRVQFGPVVALNP | |
| | ATLLPLPEEGAPHDCLEILAETHGTRPDLTDQPIPDADHTWYTDGSSF | |
| | LQEGQRKAGAAVTTETEVIWAGALPAGTSAQRAELIALTQALKMAEGK | |
| | RLNVYTDSRYAFATAHIHGEIYRRRGLLTSEGREIKNKSEILALLKAL | |
| | FLPKRLSIIHCLGHQKGDSAEARGNRLADQAAREAAIKTPPDTSTLL | |
| MLVBM_Q7SVK7_ | TLGIEDEYRLHETSTEPDVSLGSTWLSDFPQAWAETGGMGLAVRQAPL | 385 |
| 3mut | IIPLKATSTPVSIQQYPMSHEARLGIKPHIQRLLDQGILVPCQSPWNT | |
| | PLLPVKKPGTNDYRPVQDLREVNKRVEDIHPTVPNPYNLLSGLPPSHQ | |
| | WYTVLDLKDAFFCLRLHPTSQPLFAFEWRDPGMGISGQLTWTRLPQGF | |
| | KNSPTLFNEALHRDLADFRIQHPDLILLQYVDDILLAATSELDCQQGT | |
| | RALLQTLGDLGYRASAKKAQICQKQVKYLGYLLREGQRWLTEARKETV | |
| | MGQPVPKTPRQLREFLGTAGFCRLWIPGFAEMAAPLYPLTKPGTLESW | |
| | GPDQQKAYQEIKQALLTAPALGLPDLTKPFELFVDEKQGYAKGVLTQK | |
| | LGPWRRPVAYLSKKLDPVAAGWPPCLRMVAAIAVLTKDAGKLTMGQPL | |
| | VILAPHAVEALVKQPPDRWLSNARMTHYQAMLLDTDRVQFGPVVALNP | |
| | ATLLPLPEEGAPHDCLEILAETHGTRPDLTDQPIPDADHTWYTDGSSF | |
| | LQEGQRKAGAAVTTETEVIWAGALPAGTSAQRAELIALTQALKMAEGK | |
| | RLNVYTDSRYAFATAHIHGEIYRRRGWLTSEGREIKNKSEILALLKAL | |
| | FLPKRLSIIHCLGHQKGDSAEARGNRLADQAAREAAIKTPPDTSTLL | |
| MLVBM_Q7SVK7_ | TLGIEDEYRLHETSTEPDVSLGSTWLSDFPQAWAETGGMGLAVRQAPL | 386 |
| 3mut | IIPLKATSTPVSIQQYPMSHEARLGIKPHIQRLLDQGILVPCQSPWNT | |
| | PLLPVKKPGTNDYRPVQDLREVNKRVEDIHPTVPNPYNLLSGLPPSHQ | |
| | WYTVLDLKDAFFCLRLHPTSQPLFAFEWRDPGMGISGQLTWTRLPQGF | |
| | KNSPTLFNEALHRDLADFRIQHPDLILLQYVDDILLAATSELDCQQGT | |
| | RALLQTLGDLGYRASAKKAQICQKQVKYLGYLLREGQRWLTEARKETV | |
| | MGQPVPKTPRQLREFLGTAGFCRLWIPGFAEMAAPLYPLTKPGTLFSW | |
| | GPDQQKAYQEIKQALLTAPALGLPDLTKPFELFVDEKQGYAKGVLTQK | |
| | LGPWRRPVAYLSKKLDPVAAGWPPCLRMVAAIAVLTKDAGKLTMGQPL | |
| | VILAPHAVEALVKQPPDRWLSNARMTHYQAMLLDTDRVQFGPVVALNP | |
| | ATLLPLPEEGAPHDCLEILAETHGTRPDLTDQPIPDADHTWYTDGSSF | |
| | LQEGQRKAGAAVTTETEVIWAGALPAGTSAQRAELIALTQALKMAEGK | |
| | RLNVYTDSRYAFATAHIHGEIYRRRGWLTSEGREIKNKSEILALLKAL | |
| | FLPKRLSIIHCLGHQKGDSAEARGNRLADQAAREAAIKTPPDTSTLL | |
| MLVBM_Q7SVK7_ | LGIEDEYRLHETSTEPDVSLGSTWLSDFPQAWAETGGMGLAVRQAPLI | 387 |
| 3mutA_WS | IPLKATSTPVSIQQYPMSHEARLGIKPHIQRLLDQGILVPCQSPWNTP | |
| | LLPVKKPGTNDYRPVQDLREVNKRVEDIHPTVPNPYNLLSGLPPSHQW | |
| | YTVLDLKDAFFCLRLHPTSQPLFAFEWRDPGMGISGQLTWTRLPQGFK | |
| | NSPTLFNEALHRDLADFRIQHPDLILLQYVDDILLAATSELDCQQGTR | |
| | ALLQTLGDLGYRASAKKAQICQKQVKYLGYLLREGQRWLTEARKETVM | |
| | GQPVPKTPRQLREFLGKAGFCRLFIPGFAEMAAPLYPLTKPGTLFSWG | |
| | PDQQKAYQEIKQALLTAPALGLPDLTKPFELFVDEKQGYAKGVLTQKL | |
| | GPWRRPVAYLSKKLDPVAAGWPPCLRMVAAIAVLTKDAGKLTMGQPLV | |
| | ILAPHAVEALVKQPPDRWLSNARMTHYQAMLLDTDRVQFGPVVALNPA | |
| | TLLPLPEEGAPHDCLEILAETHGTRPDLTDQPIPDADHTWYTDGSSFL | |
| | QEGQRKAGAAVTTETEVIWAGALPAGTSAQRAELIALTQALKMAEGKR | |
| | LNVYTDSRYAFATAHIHGEIYRRRGWLTSEGREIKNKSEILALLKALF | |
| | LPKRLSIIHCLGHQKGDSAEARGNRLADQAAREAAIKTPPDTSTLLI | |
| MLVBM_Q7SVK7_ | LGIEDEYRLHETSTEPDVSLGSTWLSDFPQAWAETGGMGLAVRQAPLI | 388 |
| 3mutA_WS | IPLKATSTPVSIQQYPMSHEARLGIKPHIQRLLDQGILVPCQSPWNTP | |
| | LLPVKKPGTNDYRPVQDLREVNKRVEDIHPTVPNPYNLLSGLPPSHQW | |
| | YTVLDLKDAFFCLRLHPTSQPLFAFEWRDPGMGISGQLTWTRLPQGFK | |
| | NSPTLFNEALHRDLADFRIQHPDLILLQYVDDILLAATSELDCQQGTR | |
| | ALLQTLGDLGYRASAKKAQICQKQVKYLGYLLREGQRWLTEARKETVM | |
| | GQPVPKTPRQLREFLGKAGFCRLFIPGFAEMAAPLYPLTKPGTLFSWG | |
| | PDQQKAYQEIKQALLTAPALGLPDLTKPFELFVDEKQGYAKGVLTQKL | |
| | GPWRRPVAYLSKKLDPVAAGWPPCLRMVAAIAVLTKDAGKLTMGQPLV | |
| | ILAPHAVEALVKQPPDRWLSNARMTHYQAMLLDTDRVQFGPVVALNPA | |
| | TLLPLPEEGAPHDCLEILAETHGTRPDLTDQPIPDADHTWYTDGSSEL | |
| | QEGQRKAGAAVTTETEVIWAGALPAGTSAQRAELIALTQALKMAEGKR | |
| | LNVYTDSRYAFATAHIHGEIYRRRGWLISEGREIKNKSEILALLKALF | |
| | LPKRLSIIHCLGHQKGDSAEARGNRLADQAAREAAIKTPPDTSTLLI | |
| MLVCB_P08361 | TLNIEDEYRLHETSKEPDVSLGSTWLSDFPQAWAETGGMGLAVRQAPL | 389 |
| | IIPLKATSTPVSIKQYPMSQEARLGIKPHIQRLLDQGILVPCQSPWNT | |
| | PLLPVKKPGTNDYRPVQDLREVNKRVEDIHPTVPNPYNLLSGLPPSHQ | |
| | WYTVLDLKDAFFCLRLHPTSQPLFAFEWRDPEMGISGQLTWTRLPQGF | |
| | KNSPTLFDEALHRDLAGFRIQHPDLILLQYVDDLLLAATSELDCQQGT | |
| | RALLQTLGDLGYRASAKKAQICQKQVKYLGYLLKEGQRWLTEARKETV | |
| | MGQPIPKTPRQLREFLGTAGFCRLWIPGFAEMAAPLYPLTKTGTLFNW | |
| | GPDQQKAFQEIKQALLTAPALGLPDLTKPFELFVDEKQGYAKGVLTQK | |
| | LGPWRRPVAYLSKKLDPVAAGWPPCLRMVAAIAVLTKDAGKLTMGQPL | |
| | VILAPHAVEALVKQPPDRWLSNARMTHYQALLLDTDRVQFGPVVALNP | |
| | ATLLPLPEEGLQHDCLDILAEAHGTRSDLMDQPLPDADHTWYTDGSSF | |
| | LQEGQRKAGAAVTTETEVIWARALPAGTSAQRAELIALTQALKMAEGK | |
| | KLNVYTDSRYAFATAHIHGEIYRRRGLLTSEGKEIKNKDEILALLKAL | |
| | FLPKRLSIIHCPGHQKGNSAEARGNRMADQAAREVATRETPETSTLL | |
| MLVCB_P08361_ | TLNIEDEYRLHETSKEPDVSLGSTWLSDFPQAWAETGGMGLAVRQAPL | 390 |
| 3mut | IIPLKATSTPVSIKQYPMSQEARLGIKPHIQRLLDQGILVPCQSPWNT | |
| | PLLPVKKPGTNDYRPVQDLREVNKRVEDIHPTVPNPYNLLSGLPPSHQ | |
| | WYTVLDLKDAFFCLRLHPTSQPLFAFEWRDPEMGISGQLTWTRLPQGF | |
| | KNSPTLFNEALHRDLAGFRIQHPDLILLQYVDDLLLAATSELDCQQGT | |
| | RALLQTLGDLGYRASAKKAQICQKQVKYLGYLLKEGQRWLTEARKETV | |
| | MGQPIPKTPRQLREFLGTAGFCRLWIPGFAEMAAPLYPLTKPGTLENW | |
| | GPDQQKAFQEIKQALLTAPALGLPDLTKPFELFVDEKQGYAKGVLTQK | |
| | LGPWRRPVAYLSKKLDPVAAGWPPCLRMVAAIAVLTKDAGKLTMGQPL | |
| | VILAPHAVEALVKQPPDRWLSNARMTHYQALLLDTDRVQFGPVVALNP | |
| | ATLLPLPEEGLQHDCLDILAEAHGTRSDLMDQPLPDADHTWYTDGSSF | |
| | LQEGQRKAGAAVTTETEVIWARALPAGTSAQRAELIALTQALKMAEGK | |
| | KLNVYTDSRYAFATAHIHGEIYRRRGWLTSEGKEIKNKDEILALLKAL | |
| | FLPKRLSIIHCPGHQKGNSAEARGNRMADQAAREVATRETPETSTLL | |
| MLVCB_P08361_ | TLNIEDEYRLHETSKEPDVSLGSTWLSDFPQAWAETGGMGLAVRQAPL | 391 |
| 3mutA | IIPLKATSTPVSIKQYPMSQEARLGIKPHIQRLLDQGILVPCQSPWNT | |
| | PLLPVKKPGTNDYRPVQDLREVNKRVEDIHPTVPNPYNLLSGLPPSHQ | |
| | WYTVLDLKDAFFCLRLHPTSQPLFAFEWRDPEMGISGQLTWTRLPQGF | |
| | KNSPTLFNEALHRDLAGFRIQHPDLILLQYVDDLLLAATSELDCQQGT | |
| | RALLQTLGDLGYRASAKKAQICQKQVKYLGYLLKEGQRWLTEARKETV | |
| | MGQPIPKTPRQLREFLGKAGFCRLFIPGFAEMAAPLYPLTKPGTLFNW | |
| | GPDQQKAFQEIKQALLTAPALGLPDLTKPFELFVDEKQGYAKGVLTQK | |
| | LGPWRRPVAYLSKKLDPVAAGWPPCLRMVAAIAVLTKDAGKLTMGQPL | |
| | VILAPHAVEALVKQPPDRWLSNARMTHYQALLLDTDRVQFGPVVALNP | |
| | ATLLPLPEEGLQHDCLDILAEAHGTRSDLMDQPLPDADHTWYTDGSSF | |
| | LQEGQRKAGAAVTTETEVIWARALPAGTSAQRAELIALTQALKMAEGK | |
| | KLNVYTDSRYAFATAHIHGEIYRRRGWLTSEGKEIKNKDEILALLKAL | |
| | FLPKRLSIIHCPGHQKGNSAEARGNRMADQAAREVATRETPETSTLL | |
| MLVF5_P26810 | TLNIEDEYRLHETSKGPDVPLGSTWLSDFPQAWAETGGMGLAFRQAPL | 392 |
| | IISLKATSTPVSIKQYPMSQEARLGIKPHIQRLLDQGILVPCQSPWNT | |
| | PLLPVKKPGTNDYRPVQDLREVNKRVEDIHPTVPNPYNLLSGLPPSHQ | |
| | WYTVLDLKDAFFCLRLHPTSQSLFAFEWKDPEMGISGQLTWTRLPQGF | |
| | KNSPTLFDEALHRDLADFRIQHPDLILLQYVDDLLLAATSELDCQQGT | |
| | RALLQTLGDLGYRASAKKAQICQKQVKYLGYLLKEGQRWLTEARKETV | |
| | MGQPTPKTPRQLREFLGTAGLCRLWIPGFAEMAAPLYPLTKTGTLFKW | |
| | GPDQQKAYQEIKQALLTAPALGLPDLTKPFELFVDEKQGYAKGVLTQK | |
| | LGPWRRPVAYLSKKLDPVAAGWPPCLRMVAAIAVLTKDVGKLTMGQPL | |
| | VILAPHAVEALVKQPPDRWLSNARMTHYQALLLDTDRVQFGPIVALNP | |
| | ATLLPLPEEGLQHDCLDILAEAHGTRPDLTDQPLPDADHTWYTDGSSF | |
| | LQEGQRRAGAAVTTETEVIWAKALPAGTSAQRAELIALTQALKMAAGK | |
| | KLNVYTDSRYAFATAHIHGEIYRRRGLLTSEGKEIKNKDEILALLKAL | |
| | FLPKRLSIIHCPGHQKGNHAEARGNRMADQAAREVATRETPETSTLL | |
| MLVF5_P26810_ | TLNIEDEYRLHETSKGPDVPLGSTWLSDFPQAWAETGGMGLAFRQAPL | 393 |
| 3mut | IISLKATSTPVSIKQYPMSQEARLGIKPHIQRLLDQGILVPCQSPWNT | |
| | PLLPVKKPGTNDYRPVQDLREVNKRVEDIHPTVPNPYNLLSGLPPSHQ | |
| | WYTVLDLKDAFFCLRLHPTSQSLFAFEWKDPEMGISGQLTWTRLPQGF | |
| | KNSPTLFNEALHRDLADFRIQHPDLILLQYVDDLLLAATSELDCQQGT | |
| | RALLQTLGDLGYRASAKKAQICQKQVKYLGYLLKEGQRWLTEARKETV | |
| | MGQPTPKTPRQLREFLGTAGLCRLWIPGFAEMAAPLYPLTKPGTLFKW | |
| | GPDQQKAYQEIKQALLTAPALGLPDLTKPFELFVDEKQGYAKGVLTQK | |
| | LGPWRRPVAYLSKKLDPVAAGWPPCLRMVAAIAVLTKDVGKLTMGQPL | |
| | VILAPHAVEALVKQPPDRWLSNARMTHYQALLLDTDRVQFGPIVALNP | |
| | ATLLPLPEEGLQHDCLDILAEAHGTRPDLTDQPLPDADHTWYTDGSSF | |
| | LQEGQRRAGAAVTTETEVIWAKALPAGTSAQRAELIALTQALKMAAGK | |
| | KLNVYTDSRYAFATAHIHGEIYRRRGWLTSEGKEIKNKDEILALLKAL | |
| | FLPKRLSIIHCPGHQKGNHAEARGNRMADQAAREVATRETPETSTLL | |
| MLVF5_P26810_ | TLNIEDEYRLHETSKGPDVPLGSTWLSDFPQAWAETGGMGLAFRQAPL | 394 |
| 3mutA | IISLKATSTPVSIKQYPMSQEARLGIKPHIQRLLDQGILVPCQSPWNT | |
| | PLLPVKKPGTNDYRPVQDLREVNKRVEDIHPTVPNPYNLLSGLPPSHQ | |
| | WYTVLDLKDAFFCLRLHPTSQSLFAFEWKDPEMGISGQLTWIRLPQGF | |
| | KNSPTLFNEALHRDLADFRIQHPDLILLQYVDDLLLAATSELDCQQGT | |
| | RALLQTLGDLGYRASAKKAQICQKQVKYLGYLLKEGQRWLTEARKETV | |
| | MGQPTPKTPRQLREFLGKAGLCRLFIPGFAEMAAPLYPLTKPGTLFKW | |
| | GPDQQKAYQEIKQALLTAPALGLPDLTKPFELFVDEKQGYAKGVLTQK | |
| | LGPWRRPVAYLSKKLDPVAAGWPPCLRMVAAIAVLTKDVGKLTMGQPL | |
| | VILAPHAVEALVKQPPDRWLSNARMTHYQALLLDTDRVQFGPIVALNP | |
| | ATLLPLPEEGLQHDCLDILAEAHGTRPDLTDQPLPDADHTWYTDGSSF | |
| | LQEGQRRAGAAVTTETEVIWAKALPAGTSAQRAELIALTQALKMAAGK | |
| | KLNVYTDSRYAFATAHIHGEIYRRRGWLTSEGKEIKNKDEILALLKAL | |
| | FLPKRLSIIHCPGHQKGNHAEARGNRMADQAAREVATRETPETSTLL | |
| MLVFF_P26809_ | TLNIEDEYRLHETSKGPDVPLGSTWLSDFPQAWAETGGMGLAVRQAPL | 395 |
| 3mut | IIPLKATSTPVSIKQYPMSQEARLGIKPHIQRLLDQGILVPCQSPWNT | |
| | PLLPVKKPGTNDYRPVQDLREVNKRVEDIHPTVPNPYNLLSGLPPSHQ | |
| | WYTVLDLKDAFFCLRLHPTSQSLFAFEWRDPEMGISGQLTWTRLPQGF | |
| | KNSPTLFNEALHRDLADFRIQHPDLILLQYVDDLLLAATSELDCQQGT | |
| | RALLQTLGDLGYRASAKKAQICQKQVKYLGYLLKEGQRWLTEARKETV | |
| | MGQPTPKTPRQLREFLGTAGFCRLWIPGFAEMAAPLYPLTKPGTLFEW | |
| | GPDQQKAYQEIKQALLTAPALGLPDLTKPFELFVDEKQGYAKGVLTQK | |
| | LGPWRRPVAYLSKKLDPVAAGWPPCLRMVAAIAVLTKDAGKLTMGQPL | |
| | VILAPHAVEALVKQPPDRWLSNARMTHYQALLLDTDRVQFGPIVALNP | |
| | ATLLPLPEEGLQHDCLDILAEAHGTRPDLTDQPLPDADHTWYTDGSSF | |
| | LQEGQRKAGAAVTTETEVVWAKALPAGTSAQRAELIALTQALKMAEGK | |
| | KLNVYTDSRYAFATAHIHGEIYRRRGWLTSEGKEIKNKDEILALLKAL | |
| | FLPKRLSIIHCPGHQKGNRAEARGNRMADQAAREVATRETPETSTLL | |
| MLVFF_P26809_ | TLNIEDEYRLHETSKGPDVPLGSTWLSDFPQAWAETGGMGLAVRQAPL | 396 |
| 3mutA | IIPLKATSTPVSIKQYPMSQEARLGIKPHIQRLLDQGILVPCQSPWNT | |
| | PLLPVKKPGTNDYRPVQDLREVNKRVEDIHPTVPNPYNLLSGLPPSHQ | |
| | WYTVLDLKDAFFCLRLHPTSQSLFAFEWRDPEMGISGQLTWTRLPQGF | |
| | KNSPTLFNEALHRDLADFRIQHPDLILLQYVDDLLLAATSELDCQQGT | |
| | RALLQTLGDLGYRASAKKAQICQKQVKYLGYLLKEGQRWLTEARKETV | |
| | MGQPTPKTPRQLREFLGKAGFCRLFIPGFAEMAAPLYPLTKPGTLFEW | |
| | GPDQQKAYQEIKQALLTAPALGLPDLTKPFELFVDEKQGYAKGVLTQK | |
| | LGPWRRPVAYLSKKLDPVAAGWPPCLRMVAAIAVLTKDAGKLTMGQPL | |
| | VILAPHAVEALVKQPPDRWLSNARMTHYQALLLDTDRVQFGPIVALNP | |
| | ATLLPLPEEGLQHDCLDILAEAHGTRPDLTDQPLPDADHTWYTDGSSF | |
| | LQEGQRKAGAAVTTETEVVWAKALPAGTSAQRAELIALTQALKMAEGK | |
| | KLNVYTDSRYAFATAHIHGEIYRRRGWLTSEGKEIKNKDEILALLKAL | |
| | FLPKRLSIIHCPGHQKGNRAEARGNRMADQAAREVATRETPETSTLL | |
| MLVMS_P03355 | TLNIEDEHRLHETSKEPDVSLGSTWLSDFPQAWAETGGMGLAVRQAPL | 397 |
| | IIPLKATSTPVSIKQYPMSQEARLGIKPHIQRLLDQGILVPCQSPWNT | |
| | PLLPVKKPGTNDYRPVQDLREVNKRVEDIHPTVPNPYNLLSGLPPSHQ | |
| | WYTVLDLKDAFFCLRLHPTSQPLFAFEWRDPEMGISGQLTWTRLPQGF | |
| | KNSPTLFDEALHRDLADFRIQHPDLILLQYVDDLLLAATSELDCQQGT | |
| | RALLQTLGNLGYRASAKKAQICQKQVKYLGYLLKEGQRWLTEARKETV | |
| | MGQPTPKTPRQLREFLGTAGFCRLWIPGFAEMAAPLYPLTKTGTLFNW | |
| | GPDQQKAYQEIKQALLTAPALGLPDLTKPFELFVDEKQGYAKGVLTQK | |
| | LGPWRRPVAYLSKKLDPVAAGWPPCLRMVAAIAVLTKDAGKLTMGQPL | |
| | VILAPHAVEALVKQPPDRWLSNARMTHYQALLLDTDRVQFGPVVALNP | |
| | ATLLPLPEEGLQHNCLDILAEAHGTRPDLTDQPLPDADHTWYTDGSSL | |
| | LQEGQRKAGAAVTTETEVIWAKALPAGTSAQRAELIALTQALKMAEGK | |
| | KLNVYTDSRYAFATAHIHGEIYRRRGLLTSEGKEIKNKDEILALLKAL | |
| | FLPKRLSIIHCPGHQKGHSAEARGNRMADQAARKAAITETPDTSTLL | |
| MLVMS_reference | TLNIEDEYRLHETSKEPDVSLGSTWLSDFPQAWAETGGMGLAVRQAPL | 398 |
| | IIPLKATSTPVSIKQYPMSQEARLGIKPHIQRLLDQGILVPCQSPWNT | |
| | PLLPVKKPGTNDYRPVQDLREVNKRVEDIHPTVPNPYNLLSGLPPSHQ | |
| | WYTVLDLKDAFFCLRLHPTSQPLFAFEWRDPEMGISGQLTWTRLPQGF | |
| | KNSPTLFNEALHRDLADFRIQHPDLILLQYVDDLLLAATSELDCQQGT | |
| | RALLQTLGNLGYRASAKKAQICQKQVKYLGYLLKEGQRWLTEARKETV | |
| | MGQPTPKTPRQLREFLGKAGFCRLFIPGFAEMAAPLYPLTKPGTLENW | |
| | GPDQQKAYQEIKQALLTAPALGLPDLTKPFELFVDEKQGYAKGVLTQK | |
| | LGPWRRPVAYLSKKLDPVAAGWPPCLRMVAAIAVLTKDAGKLTMGQPL | |
| | VILAPHAVEALVKQPPDRWLSNARMTHYQALLLDTDRVQFGPVVALNP | |
| | ATLLPLPEEGLQHNCLDILAEAHGTRPDLTDQPLPDADHTWYTDGSSL | |
| | LQEGQRKAGAAVTTETEVIWAKALPAGTSAQRAELIALTQALKMAEGK | |
| | KLNVYTDSRYAFATAHIHGEIYRRRGWLTSEGKEIKNKDEILALLKAL | |
| | FLPKRLSIIHCPGHQKGHSAEARGNRMADQAARKAAITETPDTSTLLI | |
| | ENSSP | |
| MLVMS_P03355 | TLNIEDEHRLHETSKEPDVSLGSTWLSDFPQAWAETGGMGLAVRQAPL | 399 |
| | IIPLKATSTPVSIKQYPMSQEARLGIKPHIQRLLDQGILVPCQSPWNT | |
| | PLLPVKKPGTNDYRPVQDLREVNKRVEDIHPTVPNPYNLLSGLPPSHQ | |
| | WYTVLDLKDAFFCLRLHPTSQPLFAFEWRDPEMGISGQLTWTRLPQGF | |
| | KNSPTLFDEALHRDLADFRIQHPDLILLQYVDDLLLAATSELDCQQGT | |
| | RALLQTLGNLGYRASAKKAQICQKQVKYLGYLLKEGQRWLTEARKETV | |
| | MGQPTPKTPRQLREFLGTAGFCRLWIPGFAEMAAPLYPLTKTGTLFNW | |
| | GPDQQKAYQEIKQALLTAPALGLPDLTKPFELFVDEKQGYAKGVLTQK | |
| | LGPWRRPVAYLSKKLDPVAAGWPPCLRMVAAIAVLTKDAGKLTMGQPL | |
| | VILAPHAVEALVKQPPDRWLSNARMTHYQALLLDTDRVQFGPVVALNP | |
| | ATLLPLPEEGLQHNCLDILAEAHGTRPDLTDQPLPDADHTWYTDGSSL | |
| | LQEGQRKAGAAVTTETEVIWAKALPAGTSAQRAELIALTQALKMAEGK | |
| | KLNVYTDSRYAFATAHIHGEIYRRRGLLTSEGKEIKNKDEILALLKAL | |
| | FLPKRLSIIHCPGHQKGHSAEARGNRMADQAARKAAITETPDTSTLL | |
| MLVMS_P03355_ | TLNIEDEHRLHETSKEPDVSLGSTWLSDFPQAWAETGGMGLAVRQAPL | 400 |
| 3mut | IIPLKATSTPVSIKQYPMSQEARLGIKPHIQRLLDQGILVPCQSPWNT | |
| | PLLPVKKPGTNDYRPVQDLREVNKRVEDIHPTVPNPYNLLSGLPPSHQ | |
| | WYTVLDLKDAFFCLRLHPTSQPLFAFEWRDPEMGISGQLTWTRLPQGF | |
| | KNSPTLFNEALHRDLADFRIQHPDLILLQYVDDLLLAATSELDCQQGT | |
| | RALLQTLGNLGYRASAKKAQICQKQVKYLGYLLKEGQRWLTEARKETV | |
| | MGQPTPKTPRQLREFLGTAGFCRLWIPGFAEMAAPLYPLTKPGTLENW | |
| | GPDQQKAYQEIKQALLTAPALGLPDLTKPFELFVDEKQGYAKGVLTQK | |
| | LGPWRRPVAYLSKKLDPVAAGWPPCLRMVAAIAVLTKDAGKLTMGQPL | |
| | VILAPHAVEALVKQPPDRWLSNARMTHYQALLLDTDRVQFGPVVALNP | |
| | ATLLPLPEEGLQHNCLDILAEAHGTRPDLTDQPLPDADHTWYTDGSSL | |
| | LQEGQRKAGAAVTTETEVIWAKALPAGTSAQRAELIALTQALKMAEGK | |
| | KLNVYTDSRYAFATAHIHGEIYRRRGWLTSEGKEIKNKDEILALLKAL | |
| | FLPKRLSIIHCPGHQKGHSAEARGNRMADQAARKAAITETPDTSTLL | |
| MLVMS_P03355_ | TLNIEDEHRLHETSKEPDVSLGSTWLSDFPQAWAETGGMGLAVRQAPL | 401 |
| 3mut | IIPLKATSTPVSIKQYPMSQEARLGIKPHIQRLLDQGILVPCQSPWNT | |
| | PLLPVKKPGTNDYRPVQDLREVNKRVEDIHPTVPNPYNLLSGLPPSHQ | |
| | WYTVLDLKDAFFCLRLHPTSQPLFAFEWRDPEMGISGQLTWTRLPQGF | |
| | KNSPTLFNEALHRDLADFRIQHPDLILLQYVDDLLLAATSELDCQQGT | |
| | RALLQTLGNLGYRASAKKAQICQKQVKYLGYLLKEGQRWLTEARKETV | |
| | MGQPTPKTPRQLREFLGTAGFCRLWIPGFAEMAAPLYPLTKPGTLENW | |
| | GPDQQKAYQEIKQALLTAPALGLPDLTKPFELFVDEKQGYAKGVLTQK | |
| | LGPWRRPVAYLSKKLDPVAAGWPPCLRMVAAIAVLTKDAGKLTMGQPL | |
| | VILAPHAVEALVKQPPDRWLSNARMTHYQALLLDTDRVQFGPVVALNP | |
| | ATLLPLPEEGLQHNCLDILAEAHGTRPDLTDQPLPDADHTWYTDGSSL | |
| | LQEGQRKAGAAVTTETEVIWAKALPAGTSAQRAELIALTQALKMAEGK | |
| | KLNVYTDSRYAFATAHIHGEIYRRRGWLTSEGKEIKNKDEILALLKAL | |
| | FLPKRLSIIHCPGHQKGHSAEARGNRMADQAARKAAITETPDTSTLL | |
| MLVMS_P03355_ | TLNIEDEHRLHETSKEPDVSLGSTWLSDFPQAWAETGGMGLAVRQAPL | 402 |
| 3mutA_WS | IIPLKATSTPVSIKQYPMSQEARLGIKPHIQRLLDQGILVPCQSPWNT | |
| | PLLPVKKPGTNDYRPVQDLREVNKRVEDIHPTVPNPYNLLSGLPPSHQ | |
| | WYTVLDLKDAFFCLRLHPTSQPLFAFEWRDPEMGISGQLTWTRLPQGF | |
| | KNSPTLFNEALHRDLADFRIQHPDLILLQYVDDLLLAATSELDCQQGT | |
| | RALLQTLGNLGYRASAKKAQICQKQVKYLGYLLKEGQRWLTEARKETV | |
| | MGQPTPKTPRQLREFLGKAGFCRLFIPGFAEMAAPLYPLTKPGTLENW | |
| | GPDQQKAYQEIKQALLTAPALGLPDLTKPFELFVDEKQGYAKGVLTQK | |
| | LGPWRRPVAYLSKKLDPVAAGWPPCLRMVAAIAVLTKDAGKLTMGQPL | |
| | VILAPHAVEALVKQPPDRWLSNARMTHYQALLLDTDRVQFGPVVALNP | |
| | ATLLPLPEEGLQHNCLDILAEAHGTRPDLTDQPLPDADHTWYTDGSSL | |
| | LQEGQRKAGAAVTTETEVIWAKALPAGTSAQRAELIALTQALKMAEGK | |
| | KLNVYTDSRYAFATAHIHGEIYRRRGWLTSEGKEIKNKDEILALLKAL | |
| | FLPKRLSIIHCPGHQKGHSAEARGNRMADQAARKAAITETPDTSTLL | |
| MLVMS_P03355_ | TLNIEDEHRLHETSKEPDVSLGSTWLSDFPQAWAETGGMGLAVRQAPL | 403 |
| 3mutA_WS | IIPLKATSTPVSIKQYPMSQEARLGIKPHIQRLLDQGILVPCQSPWNT | |
| | PLLPVKKPGTNDYRPVQDLREVNKRVEDIHPTVPNPYNLLSGLPPSHQ | |
| | WYTVLDLKDAFFCLRLHPTSQPLFAFEWRDPEMGISGQLTWIRLPQGF | |
| | KNSPTLFNEALHRDLADFRIQHPDLILLQYVDDLLLAATSELDCQQGT | |
| | RALLQTLGNLGYRASAKKAQICQKQVKYLGYLLKEGQRWLTEARKETV | |
| | MGQPTPKTPRQLREFLGKAGFCRLFIPGFAEMAAPLYPLTKPGTLENW | |
| | GPDQQKAYQEIKQALLTAPALGLPDLTKPFELFVDEKQGYAKGVLTQK | |
| | LGPWRRPVAYLSKKLDPVAAGWPPCLRMVAAIAVLTKDAGKLTMGQPL | |
| | VILAPHAVEALVKQPPDRWLSNARMTHYQALLLDTDRVQFGPVVALNP | |
| | ATLLPLPEEGLQHNCLDILAEAHGTRPDLTDQPLPDADHTWYTDGSSL | |
| | LQEGQRKAGAAVTTETEVIWAKALPAGTSAQRAELIALTQALKMAEGK | |
| | KLNVYTDSRYAFATAHIHGEIYRRRGWLTSEGKEIKNKDEILALLKAL | |
| | FLPKRLSIIHCPGHQKGHSAEARGNRMADQAARKAAITETPDTSTLL | |
| MLVMS_P03355_ | TLNIEDEYRLHETSKEPDVSLGSTWLSDFPQAWAETGGMGLAVRQAPL | 404 |
| PLV919 | IIPLKATSTPVSIKQYPMSQEARLGIKPHIQRLLDQGILVPCQSPWNT | |
| | PLLPVKKPGTNDYRPVQDLREVNKRVEDIHPTVPNPYNLLSGLPPSHQ | |
| | WYTVLDLKDAFFCLRLHPTSQPLFAFEWRDPEMGISGQLTWIRLPQGF | |
| | KNSPTLFNEALHRDLADFRIQHPDLILLQYVDDLLLAATSELDCQQGT | |
| | RALLQTLGNLGYRASAKKAQICQKQVKYLGYLLKEGQRWLTEARKETV | |
| | MGQPTPKTPRQLREFLGKAGFCRLFIPGFAEMAAPLYPLTKPGTLFNW | |
| | GPDQQKAYQEIKQALLTAPALGLPDLTKPFELFVDEKQGYAKGVLTQK | |
| | LGPWRRPVAYLSKKLDPVAAGWPPCLRMVAAIAVLTKDAGKLTMGQPL | |
| | VILAPHAVEALVKQPPDRWLSNARMTHYQALLLDTDRVQFGPVVALNP | |
| | ATLLPLPEEGLQHNCLDILAEAHGTRPDLTDQPLPDADHTWYTDGSSL | |
| | LQEGQRKAGAAVTTETEVIWAKALPAGTSAQRAELIALTQALKMAEGK | |
| | KLNVYTDSRYAFATAHIHGEIYRRRGWLTSEGKEIKNKDEILALLKAL | |
| | FLPKRLSIIHCPGHQKGHSAEARGNRMADQAARKAAITETPDTSTLLI | |
| | ENSSPSGGSKRTADGSEFE | |
| MLVMS_P03355_ | TLNIEDEYRLHETSKEPDVSLGSTWLSDFPQAWAETGGMGLAVRQAPL | 405 |
| PLV919 | IIPLKATSTPVSIKQYPMSQEARLGIKPHIQRLLDQGILVPCQSPWNT | |
| | PLLPVKKPGTNDYRPVQDLREVNKRVEDIHPTVPNPYNLLSGLPPSHQ | |
| | WYTVLDLKDAFFCLRLHPTSQPLFAFEWRDPEMGISGQLTWTRLPQGF | |
| | KNSPTLFNEALHRDLADFRIQHPDLILLQYVDDLLLAATSELDCQQGT | |
| | RALLQTLGNLGYRASAKKAQICQKQVKYLGYLLKEGQRWLTEARKETV | |
| | MGQPTPKTPRQLREFLGKAGFCRLFIPGFAEMAAPLYPLTKPGTLFNW | |
| | GPDQQKAYQEIKQALLTAPALGLPDLTKPFELFVDEKQGYAKGVLTQK | |
| | LGPWRRPVAYLSKKLDPVAAGWPPCLRMVAAIAVLTKDAGKLTMGQPL | |
| | VILAPHAVEALVKQPPDRWLSNARMTHYQALLLDTDRVQFGPVVALNP | |
| | ATLLPLPEEGLQHNCLDILAEAHGTRPDLTDQPLPDADHTWYTDGSSL | |
| | LQEGQRKAGAAVTTETEVIWAKALPAGTSAQRAELIALTQALKMAEGK | |
| | KLNVYTDSRYAFATAHIHGEIYRRRGWLTSEGKEIKNKDEILALLKAL | |
| | FLPKRLSIIHCPGHQKGHSAEARGNRMADQAARKAAITETPDTSTLLI | |
| | ENSSPSGGSKRTADGSEFE | |
| MLVRD_P11227 | TLNIEDEYRLHEISTEPDVSPGSTWLSDFPQAWAETGGMGLAVRQAPL | 406 |
| | IIPLKATSTPVSIKQYPMSQEAKLGIKPHIQRLLDQGILVPCQSPWNT | |
| | PLLPVKKPGTNDYRPVQGLREVNKRVEDIHPTVPNPYNLLSGLPTSHR | |
| | WYTVLDLKDAFFCLRLHPTSQPLFASEWRDPGMGISGQLTWTRLPQGF | |
| | KNSPTLFDEALHRGLADFRIQHPDLILLQYVDDLLLAATSELDCQQGT | |
| | RALLKTLGNLGYRASAKKAQICQKQVKYLGYLLREGQRWLTEARKETV | |
| | MGQPTPKTPRQLREFLGTAGFCRLWIPRFAEMAAPLYPLTKTGTLFNW | |
| | GPDQQKAYHEIKQALLTAPALGLPDLTKPFELFVDEKQGYAKGVLTQK | |
| | LGPWRRPVAYLSKKLDPVAAGWPPCLRMVAAIAVLTKDAGKLTMGQPL | |
| | VILAPHAVEALVKQPPDRWLSNARMTHYQAMLLDTDRVQFGPVVALNP | |
| | ATLLPLPEEGAPHDCLEILAETHGTEPDLTDQPIPDADHTWYTDGSSF | |
| | LQEGQRKAGAAVTTETEVIWARALPAGTSAQRAELIALTQALKMAEGK | |
| | RLNVYTDSRYAFATAHIHGEIYKRRGLLTSEGREIKNKSEILALLKAL | |
| | FLPKRLSIIHCLGHQKGDSAEARGNRLADQAAREAAIKTPPDTSTLL | |
| MLVRD_P11227_ | TLNIEDEYRLHEISTEPDVSPGSTWLSDFPQAWAETGGMGLAVRQAPL | 407 |
| 3mut | IIPLKATSTPVSIKQYPMSQEAKLGIKPHIQRLLDQGILVPCQSPWNT | |
| | PLLPVKKPGTNDYRPVQGLREVNKRVEDIHPTVPNPYNLLSGLPTSHR | |
| | WYTVLDLKDAFFCLRLHPTSQPLFASEWRDPGMGISGQLTWTRLPQGF | |
| | KNSPTLFNEALHRGLADFRIQHPDLILLQYVDDLLLAATSELDCQQGT | |
| | RALLKTLGNLGYRASAKKAQICQKQVKYLGYLLREGQRWLTEARKETV | |
| | MGQPTPKTPRQLREFLGTAGFCRLWIPRFAEMAAPLYPLTKPGTLENW | |
| | GPDQQKAYHEIKQALLTAPALGLPDLTKPFELFVDEKQGYAKGVLTQK | |
| | LGPWRRPVAYLSKKLDPVAAGWPPCLRMVAAIAVLTKDAGKLTMGQPL | |
| | VILAPHAVEALVKQPPDRWLSNARMTHYQAMLLDTDRVQFGPVVALNP | |
| | ATLLPLPEEGAPHDCLEILAETHGTEPDLTDQPIPDADHTWYTDGSSF | |
| | LQEGQRKAGAAVTTETEVIWARALPAGTSAQRAELIALTQALKMAEGK | |
| | RLNVYTDSRYAFATAHIHGEIYKRRGWLTSEGREIKNKSEILALLKAL | |
| | FLPKRLSIIHCLGHQKGDSAEARGNRLADQAAREAAIKTPPDTSTLL | |
| MMTVB_P03365 | WVQEISDSRPMLHIYLNGRRFLGLLNTGADKTCIAGRDWPANWPIHQT | 408 |
| | ESSLQGLGMACGVARSSQPLRWQHEDKSGIIHPFVIPTLPFTLWGRDI | |
| | MKDIKVRLMTDSPDDSQDLMIGAIESNLFADQISWKSDQPVWLNQWPL | |
| | KQEKLQALQQLVTEQLQLGHLEESNSPWNTPVFVIKKKSGKWRLLQDL | |
| | RAVNATMHDMGALQPGLPSPVAVPKGWEIIIIDLQDCFFNIKLHPEDC | |
| | KRFAFSVPSPNFKRPYQRFQWKVLPQGMKNSPTLCQKFVDKAILTVRD | |
| | KYQDSYIVHYMDDILLAHPSRSIVDEILTSMIQALNKHGLVVSTEKIQ | |
| | KYDNLKYLGTHIQGDSVSYQKLQIRTDKLRTLNDFQKLLGNINWIRPF | |
| | LKLTTGELKPLFEILNGDSNPISTRKLTPEACKALQLMNERLSTARVK | |
| | RLDLSQPWSLCILKTEYTPTACLWQDGVVEWIHLPHISPKVITPYDIF | |
| | CTQLIIKGRHRSKELFSKDPDYIVVPYTKVQFDLLLQEKEDWPISLLG | |
| | FLGEVHFHLPKDPLLTFTLQTAIIFPHMTSTTPLEKGIVIFTDGSANG | |
| | RSVTYIQGREPIIKENTQNTAQQAEIVAVITAFEEVSQPENLYTDSKY | |
| | VTGLFPEIETATLSPRTKIYTELKHLQRLIHKRQEKFYIGHIRGHTGL | |
| | PGPLAQGNAYADSLTRILT | |
| MMTVB_P03365 | WVQEISDSRPMLHIYLNGRRFLGLLNTGADKTCIAGRDWPANWPIHQT | 409 |
| | ESSLQGLGMACGVARSSQPLRWQHEDKSGIIHPFVIPTLPFTLWGRDI | |
| | MKDIKVRLMTDSPDDSQDLMIGAIESNLFADQISWKSDQPVWLNQWPL | |
| | KQEKLQALQQLVTEQLQLGHLEESNSPWNTPVFVIKKKSGKWRLLQDL | |
| | RAVNATMHDMGALQPGLPSPVAVPKGWEIIIIDLQDCFFNIKLHPEDC | |
| | KRFAFSVPSPNFKRPYQRFQWKVLPQGMKNSPTLCQKFVDKAILTVRD | |
| | KYQDSYIVHYMDDILLAHPSRSIVDEILTSMIQALNKHGLVVSTEKIQ | |
| | KYDNLKYLGTHIQGDSVSYQKLQIRTDKLRTLNDFQKLLGNINWIRPF | |
| | LKLTTGELKPLFEILNGDSNPISTRKLTPEACKALQLMNERLSTARVK | |
| | RLDLSQPWSLCILKTEYTPTACLWQDGVVEWIHLPHISPKVITPYDIF | |
| | CTQLIIKGRHRSKELFSKDPDYIVVPYTKVQFDLLLQEKEDWPISLLG | |
| | FLGEVHFHLPKDPLLTFTLQTAIIFPHMTSTTPLEKGIVIFTDGSANG | |
| | RSVTYIQGREPIIKENTQNTAQQAEIVAVITAFEEVSQPENLYTDSKY | |
| | VTGLFPEIETATLSPRTKIYTELKHLQRLIHKRQEKFYIGHIRGHTGL | |
| | PGPLAQGNAYADSLTRILT | |
| MMTVB_P03365_ | WVQEISDSRPMLHIYLNGRRFLGLLNTGADKTCIAGRDWPANWPIHQT | 410 |
| 2mut | ESSLQGLGMACGVARSSQPLRWQHEDKSGIIHPFVIPTLPFTLWGRDI | |
| | MKDIKVRLMTDSPDDSQDLMIGAIESNLFADQISWKSDQPVWLNQWPL | |
| | KQEKLQALQQLVTEQLQLGHLEESNSPWNTPVFVIKKKSGKWRLLQDL | |
| | RAVNATMHDMGALQPGLPSPVAVPKGWEIIIIDLQDCFFNIKLHPEDC | |
| | KRFAFSVPSPNFKRPYQRFQWKVLPQGMKNSPTLCQKFVDKAILTVRD | |
| | KYQDSYIVHYMDDILLAHPSRSIVDEILTSMIQALNKHGLVVSTEKIQ | |
| | KYDNLKYLGTHIQGDSVSYQKLQIRTDKLRTLNDFQKLLGNINWIRPF | |
| | LKLTTGELKPLFEILNPDSNPISTRKLTPEACKALQLMNERLSTARVK | |
| | RLDLSQPWSLCILKTEYTPTACLWQDGVVEWIHLPHISPKVITPYDIF | |
| | CTQLIIKGRHRSKELFSKDPDYIVVPYTKVQFDLLLQEKEDWPISLLG | |
| | FLGEVHFHLPKDPLLTFTLQTAIIFPHMTSTTPLEKGIVIFTDGSANG | |
| | RSVTYIQGREPIIKENTQNTAQQAEIVAVITAFEEVSQPFNLYTDSKY | |
| | VTGLFPEIETATLSPRTKIYTELKHLQRLIHKRQEKFYIGHIRGHTGL | |
| | PGPLAQGNAYADSLTRILT | |
| MMTVB_P03365_ | VQEISDSRPMLHIYLNGRRFLGLLDTGADKTCIAGRDWPANWPIHQTE | 411 |
| 2mut_WS | SSLQGLGMACGVARSSQPLRWQHEDKSGIIHPFVIPTLPFTLWGRDIM | |
| | KDIKVRLMTDSPDDSQDLMIGAIESNLFADQISWKSDQPVWLNQWPLK | |
| | QEKLQALQQLVTEQLQLGHLEESNSPWNTPVFVIKKKSGKWRLLQDLR | |
| | AVNATMHDMGALQPGLPSPVAVPKGWEIIIIDLQDCFFNIKLHPEDCK | |
| | RFAFSVPSPNFKRPYQRFQWKVLPQGMKNSPTLCQKFVDKAILTVRDK | |
| | YQDSYIVHYMDDILLAHPSRSIVDEILTSMIQALNKHGLVVSTEKIQK | |
| | YDNLKYLGTHIQGDSVSYQKLQIRTDKLRTLNDFQKLLGNINWIRPFL | |
| | KLTTGELKPLFEILNPDSNPISTRKLTPEACKALQLMNERLSTARVKR | |
| | LDLSQPWSLCILKTEYTPTACLWQDGVVEWIHLPHISPKVITPYDIFC | |
| | TQLIIKGRHRSKELFSKDPDYIVVPYTKVQFDLLLQEKEDWPISLLGF | |
| | LGEVHFHLPKDPLLTFTLQTAIIFPHMTSTTPLEKGIVIFTDGSANGR | |
| | SVTYIQGREPIIKENTQNTAQQAEIVAVITAFEEVSQPENLYTDSKYV | |
| | TGLFPEIETATLSPRTKIYTELKHLQRLIHKRQEKFYIGHIRGHTGLP | |
| | GPLAQGNAYADSLTRILTA | |
| MMTVB_P03365_ | VQEISDSRPMLHIYLNGRRFLGLLDTGADKTCIAGRDWPANWPIHQTE | 412 |
| 2mut_WS | SSLQGLGMACGVARSSQPLRWQHEDKSGIIHPFVIPTLPFTLWGRDIM | |
| | KDIKVRLMTDSPDDSQDLMIGAIESNLFADQISWKSDQPVWLNQWPLK | |
| | QEKLQALQQLVTEQLQLGHLEESNSPWNTPVFVIKKKSGKWRLLQDLR | |
| | AVNATMHDMGALQPGLPSPVAVPKGWEIIIIDLQDCFFNIKLHPEDCK | |
| | RFAFSVPSPNFKRPYQRFQWKVLPQGMKNSPTLCQKFVDKAILTVRDK | |
| | YQDSYIVHYMDDILLAHPSRSIVDEILTSMIQALNKHGLVVSTEKIQK | |
| | YDNLKYLGTHIQGDSVSYQKLQIRTDKLRTLNDFQKLLGNINWIRPFL | |
| | KLTTGELKPLFEILNPDSNPISTRKLTPEACKALQLMNERLSTARVKR | |
| | LDLSQPWSLCILKTEYTPTACLWQDGVVEWIHLPHISPKVITPYDIFC | |
| | TQLIIKGRHRSKELFSKDPDYIVVPYTKVQFDLLLQEKEDWPISLLGF | |
| | LGEVHFHLPKDPLLTFTLQTAIIFPHMTSTTPLEKGIVIFTDGSANGR | |
| | SVTYIQGREPIIKENTQNTAQQAEIVAVITAFEEVSQPENLYTDSKYV | |
| | TGLFPEIETATLSPRTKIYTELKHLQRLIHKRQEKFYIGHIRGHTGLP | |
| | GPLAQGNAYADSLTRILTA | |
| MMTVB_P03365_ | WVQEISDSRPMLHIYLNGRRFLGLLNTGADKTCIAGRDWPANWPIHQT | 413 |
| 2mutB | ESSLQGLGMACGVARSSQPLRWQHEDKSGIIHPFVIPTLPFTLWGRDI | |
| | MKDIKVRLMTDSPDDSQDLMIGAIESNLFADQISWKSDQPVWLNQWPL | |
| | KQEKLQALQQLVTEQLQLGHLEESNSPWNTPVFVIKKKSGKWRLLQDL | |
| | RAVNATMHDMGALQPGLPSPVAPPKGWEIIIIDLQDCFFNIKLHPEDC | |
| | KRFAFSVPSPNFKRPYQRFQWKVLPQGMKNSPTLCQKFVDKAILTVRD | |
| | KYQDSYIVHYMDDILLAHPSRSIVDEILTSMIQALNKHGLVVSTEKIQ | |
| | KYDNLKYLGTHIQGDSVSYQKLQIRTDKLRTLNDFQKLLGNINWIRPF | |
| | LKLTTGELKPLFEILNPDSNPISTRKLTPEACKALQLMNERLSTARVK | |
| | RLDLSQPWSLCILKTEYTPTACLWQDGVVEWIHLPHISPKVITPYDIF | |
| | CTQLIIKGRHRSKELFSKDPDYIVVPYTKVQFDLLLQEKEDWPISLLG | |
| | FLGEVHFHLPKDPLLTFTLQTAIIFPHMTSTTPLEKGIVIFTDGSANG | |
| | RSVTYIQGREPIIKENTQNTAQQAEIVAVITAFEEVSQPFNLYTDSKY | |
| | VTGLFPEIETATLSPRTKIYTELKHLQRLIHKRQEKFYIGHIRGHTGL | |
| | PGPLAQGNAYADSLTRILT | |
| MMTVB_P03365_ | WVQEISDSRPMLHIYLNGRRFLGLLNTGADKTCIAGRDWPANWPIHQT | 414 |
| 2mutB | ESSLQGLGMACGVARSSQPLRWQHEDKSGIIHPFVIPTLPFTLWGRDI | |
| | MKDIKVRLMTDSPDDSQDLMIGAIESNLFADQISWKSDQPVWLNQWPL | |
| | KQEKLQALQQLVTEQLQLGHLEESNSPWNTPVFVIKKKSGKWRLLQDL | |
| | RAVNATMHDMGALQPGLPSPVAPPKGWEIIIIDLQDCFFNIKLHPEDC | |
| | KRFAFSVPSPNFKRPYQRFQWKVLPQGMKNSPTLCQKFVDKAILTVRD | |
| | KYQDSYIVHYMDDILLAHPSRSIVDEILTSMIQALNKHGLVVSTEKIQ | |
| | KYDNLKYLGTHIQGDSVSYQKLQIRTDKLRTLNDFQKLLGNINWIRPF | |
| | LKLTTGELKPLFEILNPDSNPISTRKLTPEACKALQLMNERLSTARVK | |
| | RLDLSQPWSLCILKTEYTPTACLWQDGVVEWIHLPHISPKVITPYDIF | |
| | CTQLIIKGRHRSKELFSKDPDYIVVPYTKVQFDLLLQEKEDWPISLLG | |
| | FLGEVHFHLPKDPLLTFTLQTAIIFPHMTSTTPLEKGIVIFTDGSANG | |
| | RSVTYIQGREPIIKENTQNTAQQAEIVAVITAFEEVSQPFNLYTDSKY | |
| | VTGLFPEIETATLSPRTKIYTELKHLQRLIHKRQEKFYIGHIRGHTGL | |
| | PGPLAQGNAYADSLTRILT | |
| MMTVB_P03365_ | VQEISDSRPMLHIYLNGRRFLGLLDTGADKTCIAGRDWPANWPIHQTE | 415 |
| 2mutB_WS | SSLQGLGMACGVARSSQPLRWQHEDKSGIIHPFVIPTLPFTLWGRDIM | |
| | KDIKVRLMTDSPDDSQDLMIGAIESNLFADQISWKSDQPVWLNQWPLK | |
| | QEKLQALQQLVTEQLQLGHLEESNSPWNTPVFVIKKKSGKWRLLQDLR | |
| | AVNATMHDMGALQPGLPSPPAVPKGWEIIIIDLQDCFFNIKLHPEDCK | |
| | RFAFSVPSPNFKRPYQRFQWKVLPQGMKNSPTLCQKFVDKAILTVRDK | |
| | YQDSYIVHYMDDILLAHPSRSIVDEILTSMIQALNKHGLVVSTEKIQK | |
| | YDNLKYLGTHIQGDSVSYQKLQIRTDKLRTLNDFQKLLGNINWIRPFL | |
| | KLTTGELKPLFEILNPDSNPISTRKLTPEACKALQLMNERLSTARVKR | |
| | LDLSQPWSLCILKTEYTPTACLWQDGVVEWIHLPHISPKVITPYDIFC | |
| | TQLIIKGRHRSKELFSKDPDYIVVPYTKVQFDLLLQEKEDWPISLLGF | |
| | LGEVHFHLPKDPLLTFTLQTAIIFPHMTSTTPLEKGIVIFTDGSANGR | |
| | SVTYIQGREPIIKENTQNTAQQAEIVAVITAFEEVSQPFNLYTDSKYV | |
| | TGLFPEIETATLSPRTKIYTELKHLQRLIHKRQEKFYIGHIRGHTGLP | |
| | GPLAQGNAYADSLTRILTA | |
| MMTVB_P03365_ | VQEISDSRPMLHIYLNGRRFLGLLDTGADKTCIAGRDWPANWPIHQTE | 416 |
| 2mutB_WS | SSLQGLGMACGVARSSQPLRWQHEDKSGIIHPFVIPTLPFTLWGRDIM | |
| | KDIKVRLMTDSPDDSQDLMIGAIESNLFADQISWKSDQPVWLNQWPLK | |
| | QEKLQALQQLVTEQLQLGHLEESNSPWNTPVFVIKKKSGKWRLLQDLR | |
| | AVNATMHDMGALQPGLPSPPAVPKGWEIIIIDLQDCFFNIKLHPEDCK | |
| | RFAFSVPSPNFKRPYQRFQWKVLPQGMKNSPTLCQKFVDKAILTVRDK | |
| | YQDSYIVHYMDDILLAHPSRSIVDEILTSMIQALNKHGLVVSTEKIQK | |
| | YDNLKYLGTHIQGDSVSYQKLQIRTDKLRTLNDFQKLLGNINWIRPFL | |
| | KLTTGELKPLFEILNPDSNPISTRKLTPEACKALQLMNERLSTARVKR | |
| | LDLSQPWSLCILKTEYTPTACLWQDGVVEWIHLPHISPKVITPYDIFC | |
| | TQLIIKGRHRSKELFSKDPDYIVVPYTKVQFDLLLQEKEDWPISLLGF | |
| | LGEVHFHLPKDPLLTFTLQTAIIFPHMTSTTPLEKGIVIFTDGSANGR | |
| | SVTYIQGREPIIKENTQNTAQQAEIVAVITAFEEVSQPFNLYTDSKYV | |
| | TGLFPEIETATLSPRTKIYTELKHLQRLIHKRQEKFYIGHIRGHTGLP | |
| | GPLAQGNAYADSLTRILTA | |
| MMTVB_P03365_ | VQEISDSRPMLHIYLNGRRFLGLLDTGADKTCIAGRDWPANWPIHQTE | 417 |
| WS | SSLQGLGMACGVARSSQPLRWQHEDKSGIIHPFVIPTLPFTLWGRDIM | |
| | KDIKVRLMTDSPDDSQDLMIGAIESNLFADQISWKSDQPVWLNQWPLK | |
| | QEKLQALQQLVTEQLQLGHLEESNSPWNTPVFVIKKKSGKWRLLQDLR | |
| | AVNATMHDMGALQPGLPSPVAVPKGWEIIIIDLQDCFFNIKLHPEDCK | |
| | RFAFSVPSPNFKRPYQRFQWKVLPQGMKNSPTLCQKFVDKAILTVRDK | |
| | YQDSYIVHYMDDILLAHPSRSIVDEILTSMIQALNKHGLVVSTEKIQK | |
| | YDNLKYLGTHIQGDSVSYQKLQIRTDKLRTLNDFQKLLGNINWIRPFL | |
| | KLTTGELKPLFEILNGDSNPISTRKLTPEACKALQLMNERLSTARVKR | |
| | LDLSQPWSLCILKTEYTPTACLWQDGVVEWIHLPHISPKVITPYDIFC | |
| | TQLIIKGRHRSKELFSKDPDYIVVPYTKVQFDLLLQEKEDWPISLLGF | |
| | LGEVHFHLPKDPLLTFTLQTAIIFPHMTSTTPLEKGIVIFTDGSANGR | |
| | SVTYIQGREPIIKENTQNTAQQAEIVAVITAFEEVSQPFNLYTDSKYV | |
| | TGLFPEIETATLSPRTKIYTELKHLQRLIHKRQEKFYIGHIRGHTGLP | |
| | GPLAQGNAYADSLTRILTA | |
| MMTVB_P03365_ | VQEISDSRPMLHIYLNGRRFLGLLDTGADKTCIAGRDWPANWPIHQTE | 418 |
| WS | SSLQGLGMACGVARSSQPLRWQHEDKSGIIHPFVIPTLPFTLWGRDIM | |
| | KDIKVRLMTDSPDDSQDLMIGAIESNLFADQISWKSDQPVWLNQWPLK | |
| | QEKLQALQQLVTEQLQLGHLEESNSPWNTPVFVIKKKSGKWRLLQDLR | |
| | AVNATMHDMGALQPGLPSPVAVPKGWEIIIIDLQDCFFNIKLHPEDCK | |
| | RFAFSVPSPNFKRPYQRFQWKVLPQGMKNSPTLCQKFVDKAILTVRDK | |
| | YQDSYIVHYMDDILLAHPSRSIVDEILTSMIQALNKHGLVVSTEKIQK | |
| | YDNLKYLGTHIQGDSVSYQKLQIRTDKLRTLNDFQKLLGNINWIRPFL | |
| | KLTTGELKPLFEILNGDSNPISTRKLTPEACKALQLMNERLSTARVKR | |
| | LDLSQPWSLCILKTEYTPTACLWQDGVVEWIHLPHISPKVITPYDIFC | |
| | TQLIIKGRHRSKELFSKDPDYIVVPYTKVQFDLLLQEKEDWPISLLGE | |
| | LGEVHFHLPKDPLLTFTLQTAIIFPHMTSTTPLEKGIVIFTDGSANGR | |
| | SVTYIQGREPIIKENTQNTAQQAEIVAVITAFEEVSQPFNLYTDSKYV | |
| | TGLFPEIETATLSPRTKIYTELKHLQRLIHKRQEKFYIGHIRGHTGLP | |
| | GPLAQGNAYADSLTRILTA | |
| MMTVB_P03365- | GRDIMKDIKVRLMTDSPDDSQDLMIGAIESNLFADQISWKSDQPVWLN | 419 |
| Pro | QWPLKQEKLQALQQLVTEQLQLGHLEESNSPWNTPVFVIKKKSGKWRL | |
| | LQDLRAVNATMHDMGALQPGLPSPVAVPKGWEIIIIDLQDCFFNIKLH | |
| | PEDCKRFAFSVPSPNFKRPYQRFQWKVLPQGMKNSPTLCQKFVDKAIL | |
| | TVRDKYQDSYIVHYMDDILLAHPSRSIVDEILTSMIQALNKHGLVVST | |
| | EKIQKYDNLKYLGTHIQGDSVSYQKLQIRTDKLRTLNDFQKLLGNINW | |
| | IRPFLKLTTGELKPLFEILNGDSNPISTRKLTPEACKALQLMNERLST | |
| | ARVKRLDLSQPWSLCILKTEYTPTACLWQDGVVEWIHLPHISPKVITP | |
| | YDIFCTQLIIKGRHRSKELFSKDPDYIVVPYTKVQFDLLLQEKEDWPI | |
| | SLLGFLGEVHFHLPKDPLLTFTLQTAIIFPHMTSTTPLEKGIVIFTDG | |
| | SANGRSVTYIQGREPIIKENTQNTAQQAEIVAVITAFEEVSQPENLYT | |
| | DSKYVTGLFPEIETATLSPRTKIYTELKHLQRLIHKRQEKFYIGHIRG | |
| | HTGLPGPLAQGNAYADSLTRILT | |
| MMTVB_P03365- | GRDIMKDIKVRLMTDSPDDSQDLMIGAIESNLFADQISWKSDQPVWLN | 420 |
| Pro | QWPLKQEKLQALQQLVTEQLQLGHLEESNSPWNTPVFVIKKKSGKWRL | |
| | LQDLRAVNATMHDMGALQPGLPSPVAVPKGWEIIIIDLQDCFFNIKLH | |
| | PEDCKRFAFSVPSPNFKRPYQRFQWKVLPQGMKNSPTLCQKFVDKAIL | |
| | TVRDKYQDSYIVHYMDDILLAHPSRSIVDEILTSMIQALNKHGLVVST | |
| | EKIQKYDNLKYLGTHIQGDSVSYQKLQIRTDKLRTLNDFQKLLGNINW | |
| | IRPFLKLTTGELKPLFEILNGDSNPISTRKLTPEACKALQLMNERLST | |
| | ARVKRLDLSQPWSLCILKTEYTPTACLWQDGVVEWIHLPHISPKVITP | |
| | YDIFCTQLIIKGRHRSKELFSKDPDYIVVPYTKVQFDLLLQEKEDWPI | |
| | SLLGFLGEVHFHLPKDPLLTFTLQTAIIFPHMTSTTPLEKGIVIFTDG | |
| | SANGRSVTYIQGREPIIKENTQNTAQQAEIVAVITAFEEVSQPENLYT | |
| | DSKYVTGLFPEIETATLSPRTKIYTELKHLQRLIHKRQEKFYIGHIRG | |
| | HTGLPGPLAQGNAYADSLTRILT | |
| MMTVB_P03365- | GRDIMKDIKVRLMTDSPDDSQDLMIGAIESNLFADQISWKSDQPVWLN | 421 |
| Pro_2mut | QWPLKQEKLQALQQLVTEQLQLGHLEESNSPWNTPVFVIKKKSGKWRL | |
| | LQDLRAVNATMHDMGALQPGLPSPVAVPKGWEIIIIDLQDCFFNIKLH | |
| | PEDCKRFAFSVPSPNFKRPYQRFQWKVLPQGMKNSPTLCQKFVDKAIL | |
| | TVRDKYQDSYIVHYMDDILLAHPSRSIVDEILTSMIQALNKHGLVVST | |
| | EKIQKYDNLKYLGTHIQGDSVSYQKLQIRTDKLRTLNDFQKLLGNINW | |
| | IRPFLKLTTGELKPLFEILNPDSNPISTRKLTPEACKALQLMNERLST | |
| | ARVKRLDLSQPWSLCILKTEYTPTACLWQDGVVEWIHLPHISPKVITP | |
| | YDIFCTQLIIKGRHRSKELFSKDPDYIVVPYTKVQFDLLLQEKEDWPI | |
| | SLLGFLGEVHFHLPKDPLLTFTLQTAIIFPHMTSTTPLEKGIVIFTDG | |
| | SANGRSVTYIQGREPIIKENTQNTAQQAEIVAVITAFEEVSQPFNLYT | |
| | DSKYVTGLFPEIETATLSPRTKIYTELKHLQRLIHKRQEKFYIGHIRG | |
| | HTGLPGPLAQGNAYADSLTRILT | |
| MMTVB_P03365- | GRDIMKDIKVRLMTDSPDDSQDLMIGAIESNLFADQISWKSDQPVWLN | 422 |
| Pro_2mut | QWPLKQEKLQALQQLVTEQLQLGHLEESNSPWNTPVFVIKKKSGKWRL | |
| | LQDLRAVNATMHDMGALQPGLPSPVAVPKGWEIIIIDLQDCFFNIKLH | |
| | PEDCKRFAFSVPSPNFKRPYQRFQWKVLPQGMKNSPTLCQKFVDKAIL | |
| | TVRDKYQDSYIVHYMDDILLAHPSRSIVDEILTSMIQALNKHGLVVST | |
| | EKIQKYDNLKYLGTHIQGDSVSYQKLQIRTDKLRTLNDFQKLLGNINW | |
| | IRPFLKLTTGELKPLFEILNPDSNPISTRKLTPEACKALQLMNERLST | |
| | ARVKRLDLSQPWSLCILKTEYTPTACLWQDGVVEWIHLPHISPKVITP | |
| | YDIFCTQLIIKGRHRSKELFSKDPDYIVVPYTKVQFDLLLQEKEDWPI | |
| | SLLGFLGEVHFHLPKDPLLTFTLQTAIIFPHMTSTTPLEKGIVIFTDG | |
| | SANGRSVTYIQGREPIIKENTQNTAQQAEIVAVITAFEEVSQPENLYT | |
| | DSKYVTGLFPEIETATLSPRTKIYTELKHLQRLIHKRQEKFYIGHIRG | |
| | HTGLPGPLAQGNAYADSLTRILT | |
| MMTVB_P03365- | GRDIMKDIKVRLMTDSPDDSQDLMIGAIESNLFADQISWKSDQPVWLN | 423 |
| Pro_2mutB | QWPLKQEKLQALQQLVTEQLQLGHLEESNSPWNTPVFVIKKKSGKWRL | |
| | LQDLRAVNATMHDMGALQPGLPSPVAPPKGWEIIIIDLQDCFFNIKLH | |
| | PEDCKRFAFSVPSPNFKRPYQRFQWKVLPQGMKNSPTLCQKFVDKAIL | |
| | TVRDKYQDSYIVHYMDDILLAHPSRSIVDEILTSMIQALNKHGLVVST | |
| | EKIQKYDNLKYLGTHIQGDSVSYQKLQIRTDKLRTLNDFQKLLGNINW | |
| | IRPFLKLTTGELKPLFEILNPDSNPISTRKLTPEACKALQLMNERLST | |
| | ARVKRLDLSQPWSLCILKTEYTPTACLWQDGVVEWIHLPHISPKVITP | |
| | YDIFCTQLIIKGRHRSKELFSKDPDYIVVPYTKVQFDLLLQEKEDWPI | |
| | SLLGFLGEVHFHLPKDPLLTFTLQTAIIFPHMTSTTPLEKGIVIFTDG | |
| | SANGRSVTYIQGREPIIKENTQNTAQQAEIVAVITAFEEVSQPENLYT | |
| | DSKYVTGLFPEIETATLSPRTKIYTELKHLQRLIHKRQEKFYIGHIRG | |
| | HTGLPGPLAQGNAYADSLTRILT | |
| MMTVB_P03365- | GRDIMKDIKVRLMTDSPDDSQDLMIGAIESNLFADQISWKSDQPVWLN | 424 |
| Pro_2mutB | QWPLKQEKLQALQQLVTEQLQLGHLEESNSPWNTPVFVIKKKSGKWRL | |
| | LQDLRAVNATMHDMGALQPGLPSPVAPPKGWEIIIIDLQDCFFNIKLH | |
| | PEDCKRFAFSVPSPNFKRPYQRFQWKVLPQGMKNSPTLCQKFVDKAIL | |
| | TVRDKYQDSYIVHYMDDILLAHPSRSIVDEILTSMIQALNKHGLVVST | |
| | EKIQKYDNLKYLGTHIQGDSVSYQKLQIRTDKLRTLNDFQKLLGNINW | |
| | IRPFLKLTTGELKPLFEILNPDSNPISTRKLTPEACKALQLMNERLST | |
| | ARVKRLDLSQPWSLCILKTEYTPTACLWQDGVVEWIHLPHISPKVITP | |
| | YDIFCTQLIIKGRHRSKELFSKDPDYIVVPYTKVQFDLLLQEKEDWPI | |
| | SLLGFLGEVHFHLPKDPLLTFTLQTAIIFPHMTSTTPLEKGIVIFTDG | |
| | SANGRSVTYIQGREPIIKENTQNTAQQAEIVAVITAFEEVSQPFNLYT | |
| | DSKYVTGLFPEIETATLSPRTKIYTELKHLQRLIHKRQEKFYIGHIRG | |
| | HTGLPGPLAQGNAYADSLTRILT | |
| MPMV_P07572 | LTAAIDILAPQQCAEPITWKSDEPVWVDQWPLINDKLAAAQQLVQEQL | 425 |
| | EAGHITESSSPWNTPIFVIKKKSGKWRLLQDLRAVNATMVLMGALQPG | |
| | LPSPVAIPQGYLKIIIDLKDCFFSIPLHPSDQKRFAFSLPSTNFKEPM | |
| | QRFQWKVLPQGMANSPTLCQKYVATAIHKVRHAWKQMYIIHYMDDILI | |
| | AGKDGQQVLQCFDQLKQELTAAGLHIAPEKVQLQDPYTYLGFELNGPK | |
| | ITNQKAVIRKDKLQTLNDFQKLLGDINWLRPYLKLTTGDLKPLFDTLK | |
| | GDSDPNSHRSLSKEALASLEKVETAIAEQFVTHINYSLPLIFLIENTA | |
| | LTPTGLFWQDNPIMWIHLPASPKKVLLPYYDAIADLIILGRDHSKKYF | |
| | GIEPSTIIQPYSKSQIDWLMQNTEMWPIACASEVGILDNHYPPNKLIQ | |
| | FCKLHTFVFPQIISKTPLNNALLVFTDGSSTGMAAYTLTDTTIKFQTN | |
| | LNSAQLVELQALIAVLSAFPNQPLNIYTDSAYLAHSIPLLETVAQIKH | |
| | ISETAKLFLQCQQLIYNRSIPFYIGHVRAHSGLPGPIAQGNQRADLAT | |
| | KIVASNINT | |
| MPMV_P07572_ | LTAAIDILAPQQCAEPITWKSDEPVWVDQWPLTNDKLAAAQQLVQEQL | 426 |
| 2mutB | EAGHITESSSPWNTPIFVIKKKSGKWRLLQDLRAVNATMVLMGALQPG | |
| | LPSPVAPPQGYLKIIIDLKDCFFSIPLHPSDQKRFAFSLPSTNFKEPM | |
| | QRFQWKVLPQGMANSPTLCQKYVATAIHKVRHAWKQMYIIHYMDDILI | |
| | AGKDGQQVLQCFDQLKQELTAAGLHIAPEKVQLQDPYTYLGFELNGPK | |
| | ITNQKAVIRKDKLQTLNDFQKLLGDINWLRPYLKLTTGDLKPLEDTLK | |
| | PDSDPNSHRSLSKEALASLEKVETAIAEQFVTHINYSLPLIFLIENTA | |
| | LTPTGLFWQDNPIMWIHLPASPKKVLLPYYDAIADLIILGRDHSKKYF | |
| | GIEPSTIIQPYSKSQIDWLMQNTEMWPIACASEVGILDNHYPPNKLIQ | |
| | FCKLHTFVFPQIISKTPLNNALLVFTDGSSTGMAAYTLTDTTIKFQTN | |
| | LNSAQLVELQALIAVLSAFPNQPLNIYTDSAYLAHSIPLLETVAQIKH | |
| | ISETAKLFLQCQQLIYNRSIPFYIGHVRAHSGLPGPIAQGNQRADLAT | |
| | KIVASNINT | |
| PERV_Q4VFZ2 | TLQLDDEYRLYSPLVKPDQNIQFWLEQFPQAWAETAGMGLAKQVPPQV | 427 |
| | IQLKASATPVSVRQYPLSKEAQEGIRPHVQRLIQQGILVPVQSPWNTP | |
| | LLPVRKPGTNDYRPVQDLREVNKRVQDIHPTVPNPYNLLCALPPQRSW | |
| | YTVLDLKDAFFCLRLHPTSQPLFAFEWRDPGTGRTGQLTWTRLPQGFK | |
| | NSPTIFDEALHRDLANFRIQHPQVTLLQYVDDLLLAGATKQDCLEGTK | |
| | ALLLELSDLGYRASAKKAQICRREVTYLGYSLRDGQRWLTEARKKTVV | |
| | QIPAPTTAKQVREFLGTAGFCRLWIPGFATLAAPLYPLTKEKGEFSWA | |
| | PEHQKAFDAIKKALLSAPALALPDVTKPFTLYVDERKGVARGVLTQTL | |
| | GPWRRPVAYLSKKLDPVASGWPVCLKAIAAVAILVKDADKLTLGQNIT | |
| | VIAPHALENIVRQPPDRWMTNARMTHYQSLLLTERVTFAPPAALNPAT | |
| | LLPEETDEPVTHDCHQLLIEETGVRKDLTDIPLTGEVLTWFTDGSSYV | |
| | VEGKRMAGAAVVDGTRTIWASSLPEGTSAQKAELMALTQALRLAEGKS | |
| | INIYTDSRYAFATAHVHGAIYKQRGLLTSAGREIKNKEEILSLLEALH | |
| | LPKRLAIIHCPGHQKAKDPISRGNQMADRVAKQAAQGVNLL | |
| PERV_Q4VFZ2 | TLQLDDEYRLYSPLVKPDQNIQFWLEQFPQAWAETAGMGLAKQVPPQV | 428 |
| | IQLKASATPVSVRQYPLSKEAQEGIRPHVQRLIQQGILVPVQSPWNTP | |
| | LLPVRKPGTNDYRPVQDLREVNKRVQDIHPTVPNPYNLLCALPPQRSW | |
| | YTVLDLKDAFFCLRLHPTSQPLFAFEWRDPGTGRTGQLTWTRLPQGFK | |
| | NSPTIFDEALHRDLANFRIQHPQVTLLQYVDDLLLAGATKQDCLEGTK | |
| | ALLLELSDLGYRASAKKAQICRREVTYLGYSLRDGQRWLTEARKKTVV | |
| | QIPAPTTAKQVREFLGTAGFCRLWIPGFATLAAPLYPLTKEKGEFSWA | |
| | PEHQKAFDAIKKALLSAPALALPDVTKPFTLYVDERKGVARGVLTQTL | |
| | GPWRRPVAYLSKKLDPVASGWPVCLKAIAAVAILVKDADKLTLGQNIT | |
| | VIAPHALENIVRQPPDRWMTNARMTHYQSLLLTERVTFAPPAALNPAT | |
| | LLPEETDEPVTHDCHQLLIEETGVRKDLTDIPLTGEVLTWFTDGSSYV | |
| | VEGKRMAGAAVVDGTRTIWASSLPEGTSAQKAELMALTQALRLAEGKS | |
| | INIYTDSRYAFATAHVHGAIYKQRGLLTSAGREIKNKEEILSLLEALH | |
| | LPKRLAIIHCPGHQKAKDPISRGNQMADRVAKQAAQGVNLL | |
| PERV_Q4VFZ2_ | TLQLDDEYRLYSPLVKPDQNIQFWLEQFPQAWAETAGMGLAKQVPPQV | 429 |
| 3mut | IQLKASATPVSVRQYPLSKEAQEGIRPHVQRLIQQGILVPVQSPWNTP | |
| | LLPVRKPGTNDYRPVQDLREVNKRVQDIHPTVPNPYNLLCALPPQRSW | |
| | YTVLDLKDAFFCLRLHPTSQPLFAFEWRDPGTGRTGQLTWTRLPQGFK | |
| | NSPTIFNEALHRDLANFRIQHPQVTLLQYVDDLLLAGATKQDCLEGTK | |
| | ALLLELSDLGYRASAKKAQICRREVTYLGYSLRDGQRWLTEARKKTVV | |
| | QIPAPTTAKQVREFLGTAGFCRLWIPGFATLAAPLYPLTKPKGEFSWA | |
| | PEHQKAFDAIKKALLSAPALALPDVTKPFTLYVDERKGVARGVLTQTL | |
| | GPWRRPVAYLSKKLDPVASGWPVCLKAIAAVAILVKDADKLTLGQNIT | |
| | VIAPHALENIVRQPPDRWMTNARMTHYQSLLLTERVTFAPPAALNPAT | |
| | LLPEETDEPVTHDCHQLLIEETGVRKDLTDIPLTGEVLTWFTDGSSYV | |
| | VEGKRMAGAAVVDGTRTIWASSLPEGTSAQKAELMALTQALRLAEGKS | |
| | INIYTDSRYAFATAHVHGAIYKQRGWLTSAGREIKNKEEILSLLEALH | |
| | LPKRLAIIHCPGHQKAKDPISRGNQMADRVAKQAAQGVNLL | |
| PERV_Q4VFZ2_ | TLQLDDEYRLYSPLVKPDQNIQFWLEQFPQAWAETAGMGLAKQVPPQV | 430 |
| 3mut | IQLKASATPVSVRQYPLSKEAQEGIRPHVQRLIQQGILVPVQSPWNTP | |
| | LLPVRKPGTNDYRPVQDLREVNKRVQDIHPTVPNPYNLLCALPPQRSW | |
| | YTVLDLKDAFFCLRLHPTSQPLFAFEWRDPGTGRTGQLTWTRLPQGFK | |
| | NSPTIFNEALHRDLANFRIQHPQVTLLQYVDDLLLAGATKQDCLEGTK | |
| | ALLLELSDLGYRASAKKAQICRREVTYLGYSLRDGQRWLTEARKKTVV | |
| | QIPAPTTAKQVREFLGTAGFCRLWIPGFATLAAPLYPLTKPKGEFSWA | |
| | PEHQKAFDAIKKALLSAPALALPDVTKPFTLYVDERKGVARGVLTQTL | |
| | GPWRRPVAYLSKKLDPVASGWPVCLKAIAAVAILVKDADKLTLGQNIT | |
| | VIAPHALENIVRQPPDRWMTNARMTHYQSLLLTERVTFAPPAALNPAT | |
| | LLPEETDEPVTHDCHQLLIEETGVRKDLTDIPLTGEVLTWFTDGSSYV | |
| | VEGKRMAGAAVVDGTRTIWASSLPEGTSAQKAELMALTQALRLAEGKS | |
| | INIYTDSRYAFATAHVHGAIYKQRGWLTSAGREIKNKEEILSLLEALH | |
| | LPKRLAIIHCPGHQKAKDPISRGNQMADRVAKQAAQGVNLL | |
| PERV_Q4VFZ2_ | LDDEYRLYSPLVKPDQNIQFWLEQFPQAWAETAGMGLAKQVPPQVIQL | 431 |
| 3mutA_WS | KASATPVSVRQYPLSKEAQEGIRPHVQRLIQQGILVPVQSPWNTPLLP | |
| | VRKPGTNDYRPVQDLREVNKRVQDIHPTVPNPYNLLCALPPQRSWYTV | |
| | LDLKDAFFCLRLHPTSQPLFAFEWRDPGTGRTGQLTWTRLPQGFKNSP | |
| | TIFNEALHRDLANFRIQHPQVTLLQYVDDLLLAGATKQDCLEGTKALL | |
| | LELSDLGYRASAKKAQICRREVTYLGYSLRDGQRWLTEARKKTVVQIP | |
| | APTTAKQVREFLGKAGFCRLFIPGFATLAAPLYPLTKPKGEFSWAPEH | |
| | QKAFDAIKKALLSAPALALPDVTKPFTLYVDERKGVARGVLTQTLGPW | |
| | RRPVAYLSKKLDPVASGWPVCLKAIAAVAILVKDADKLTLGQNITVIA | |
| | PHALENIVRQPPDRWMTNARMTHYQSLLLTERVTFAPPAALNPATLLP | |
| | EETDEPVTHDCHQLLIEETGVRKDLTDIPLTGEVLTWFTDGSSYVVEG | |
| | KRMAGAAVVDGTRTIWASSLPEGTSAQKAELMALTQALRLAEGKSINI | |
| | YTDSRYAFATAHVHGAIYKQRGWLTSAGREIKNKEEILSLLEALHLPK | |
| | RLAIIHCPGHQKAKDPISRGNQMADRVAKQAAQGVNLLP | |
| PERV_Q4VFZ2_ | LDDEYRLYSPLVKPDQNIQFWLEQFPQAWAETAGMGLAKQVPPQVIQL | 432 |
| 3mutA_WS | KASATPVSVRQYPLSKEAQEGIRPHVQRLIQQGILVPVQSPWNTPLLP | |
| | VRKPGTNDYRPVQDLREVNKRVQDIHPTVPNPYNLLCALPPQRSWYTV | |
| | LDLKDAFFCLRLHPTSQPLFAFEWRDPGTGRTGQLTWTRLPQGFKNSP | |
| | TIFNEALHRDLANFRIQHPQVTLLQYVDDLLLAGATKQDCLEGTKALL | |
| | LELSDLGYRASAKKAQICRREVTYLGYSLRDGQRWLTEARKKTVVQIP | |
| | APTTAKQVREFLGKAGFCRLFIPGFATLAAPLYPLTKPKGEFSWAPEH | |
| | QKAFDAIKKALLSAPALALPDVTKPFTLYVDERKGVARGVLTQTLGPW | |
| | RRPVAYLSKKLDPVASGWPVCLKAIAAVAILVKDADKLTLGQNITVIA | |
| | PHALENIVRQPPDRWMTNARMTHYQSLLLTERVTFAPPAALNPATLLP | |
| | EETDEPVTHDCHQLLIEETGVRKDLTDIPLTGEVLTWFTDGSSYVVEG | |
| | KRMAGAAVVDGTRTIWASSLPEGTSAQKAELMALTQALRLAEGKSINI | |
| | YTDSRYAFATAHVHGAIYKQRGWLTSAGREIKNKEEILSLLEALHLPK | |
| | RLAIIHCPGHQKAKDPISRGNQMADRVAKQAAQGVNLLP | |
| SFV1_P23074 | MDPLQLLQPLEAEIKGTKLKAHWNSGATITCVPEAFLEDERPIQTMLI | 433 |
| | KTIHGEKQQDVYYLTFKVQGRKVEAEVLASPYDYILLNPSDVPWLMKK | |
| | PLQLTVLVPLHEYQERLLQQTALPKEQKELLQKLFLKYDALWQHWENQ | |
| | VGHRRIKPHNIATGTLAPRPQKQYPINPKAKPSIQIVIDDLLKQGVLI | |
| | QQNSTMNTPVYPVPKPDGKWRMVLDYREVNKTIPLIAAQNQHSAGILS | |
| | SIYRGKYKTTLDLINGFWAHPITPESYWLTAFTWQGKQYCWTRLPQGF | |
| | LNSPALFTADVVDLLKEIPNVQAYVDDIYISHDDPQEHLEQLEKIFSI | |
| | LLNAGYVVSLKKSEIAQREVEFLGFNITKEGRGLTDTFKQKLLNITPP | |
| | KDLKQLQSILGLLNFARNFIPNYSELVKPLYTIVANANGKFISWTEDN | |
| | SNQLQHIISVLNQADNLEERNPETRLIIKVNSSPSAGYIRYYNEGSKR | |
| | PIMYVNYIFSKAEAKFTQTEKLLTTMHKGLIKAMDLAMGQEILVYSPI | |
| | VSMTKIQRTPLPERKALPVRWITWMTYLEDPRIQFHYDKSLPELQQIP | |
| | NVTEDVIAKTKHPSEFAMVFYTDGSAIKHPDVNKSHSAGMGIAQVQFI | |
| | PEYKIVHQWSIPLGDHTAQLAEIAAVEFACKKALKISGPVLIVTDSFY | |
| | VAESANKELPYWKSNGFLNNKKKPLRHVSKWKSIAECLQLKPDIIIMH | |
| | EKGHQQPMTTLHTEGNNLADKLATQGSYVVH | |
| SFV1_P23074_ | MDPLQLLQPLEAEIKGTKLKAHWNSGATITCVPEAFLEDERPIQTMLI | 434 |
| 2mut | KTIHGEKQQDVYYLTFKVQGRKVEAEVLASPYDYILLNPSDVPWLMKK | |
| | PLQLTVLVPLHEYQERLLQQTALPKEQKELLQKLFLKYDALWQHWENQ | |
| | VGHRRIKPHNIATGTLAPRPQKQYPINPKAKPSIQIVIDDLLKQGVLI | |
| | QQNSTMNTPVYPVPKPDGKWRMVLDYREVNKTIPLIAAQNQHSAGILS | |
| | SIYRGKYKTTLDLINGFWAHPITPESYWLTAFTWQGKQYCWTRLPQGF | |
| | LNSPALFNADVVDLLKEIPNVQAYVDDIYISHDDPQEHLEQLEKIFSI | |
| | LLNAGYVVSLKKSEIAQREVEFLGFNITKEGRGLTDTFKQKLLNITPP | |
| | KDLKQLQSILGLLNFARNFIPNYSELVKPLYTIVAPANGKFISWTEDN | |
| | SNQLQHIISVLNQADNLEERNPETRLIIKVNSSPSAGYIRYYNEGSKR | |
| | PIMYVNYIFSKAEAKFTQTEKLLTTMHKGLIKAMDLAMGQEILVYSPI | |
| | VSMTKIQRTPLPERKALPVRWITWMTYLEDPRIQFHYDKSLPELQQIP | |
| | NVTEDVIAKTKHPSEFAMVFYTDGSAIKHPDVNKSHSAGMGIAQVQFI | |
| | PEYKIVHQWSIPLGDHTAQLAEIAAVEFACKKALKISGPVLIVTDSFY | |
| | VAESANKELPYWKSNGFLNNKKKPLRHVSKWKSIAECLQLKPDIIIMH | |
| | EKGHQQPMTTLHTEGNNLADKLATQGSYVVH | |
| SFV1_P23074_ | MDPLQLLQPLEAEIKGTKLKAHWNSGATITCVPEAFLEDERPIQTMLI | 435 |
| 2mutA | KTIHGEKQQDVYYLTFKVQGRKVEAEVLASPYDYILLNPSDVPWLMKK | |
| | PLQLTVLVPLHEYQERLLQQTALPKEQKELLQKLFLKYDALWQHWENQ | |
| | VGHRRIKPHNIATGTLAPRPQKQYPINPKAKPSIQIVIDDLLKQGVLI | |
| | QQNSTMNTPVYPVPKPDGKWRMVLDYREVNKTIPLIAAQNQHSAGILS | |
| | SIYRGKYKTTLDLINGFWAHPITPESYWLTAFTWQGKQYCWTRLPQGF | |
| | LNSPALFNADVVDLLKEIPNVQAYVDDIYISHDDPQEHLEQLEKIFSI | |
| | LLNAGYVVSLKKSEIAQREVEFLGFNITKEGRGLTDTFKQKLLNITPP | |
| | KDLKQLQSILGKLNFARNFIPNYSELVKPLYTIVAPANGKFISWTEDN | |
| | SNQLQHIISVLNQADNLEERNPETRLIIKVNSSPSAGYIRYYNEGSKR | |
| | PIMYVNYIFSKAEAKFTQTEKLLTTMHKGLIKAMDLAMGQEILVYSPI | |
| | VSMTKIQRTPLPERKALPVRWITWMTYLEDPRIQFHYDKSLPELQQIP | |
| | NVTEDVIAKTKHPSEFAMVFYTDGSAIKHPDVNKSHSAGMGIAQVQFI | |
| | PEYKIVHQWSIPLGDHTAQLAEIAAVEFACKKALKISGPVLIVTDSFY | |
| | VAESANKELPYWKSNGFLNNKKKPLRHVSKWKSIAECLQLKPDIIIMH | |
| | EKGHQQPMTTLHTEGNNLADKLATQGSYVVH | |
| SFV1_P23074- | VPWLMKKPLQLTVLVPLHEYQERLLQQTALPKEQKELLQKLFLKYDAL | 436 |
| Pro | WQHWENQVGHRRIKPHNIATGTLAPRPQKQYPINPKAKPSIQIVIDDL | |
| | LKQGVLIQQNSTMNTPVYPVPKPDGKWRMVLDYREVNKTIPLIAAQNQ | |
| | HSAGILSSIYRGKYKTTLDLINGFWAHPITPESYWLTAFTWQGKQYCW | |
| | TRLPQGFLNSPALFTADVVDLLKEIPNVQAYVDDIYISHDDPQEHLEQ | |
| | LEKIFSILLNAGYVVSLKKSEIAQREVEFLGFNITKEGRGLTDTFKQK | |
| | LLNITPPKDLKQLQSILGLLNFARNFIPNYSELVKPLYTIVANANGKF | |
| | ISWTEDNSNQLQHIISVLNQADNLEERNPETRLIIKVNSSPSAGYIRY | |
| | YNEGSKRPIMYVNYIFSKAEAKFTQTEKLLTTMHKGLIKAMDLAMGQE | |
| | ILVYSPIVSMTKIQRTPLPERKALPVRWITWMTYLEDPRIQFHYDKSL | |
| | PELQQIPNVTEDVIAKTKHPSEFAMVFYTDGSAIKHPDVNKSHSAGMG | |
| | IAQVQFIPEYKIVHQWSIPLGDHTAQLAEIAAVEFACKKALKISGPVL | |
| | IVTDSFYVAESANKELPYWKSNGFLNNKKKPLRHVSKWKSIAECLQLK | |
| | PDIIIMHEKGHQQPMTTLHTEGNNLADKLATQGSYVVH | |
| SFV1_P23074- | VPWLMKKPLQLTVLVPLHEYQERLLQQTALPKEQKELLQKLFLKYDAL | 437 |
| Pro_2mut | WQHWENQVGHRRIKPHNIATGTLAPRPQKQYPINPKAKPSIQIVIDDL | |
| | LKQGVLIQQNSTMNTPVYPVPKPDGKWRMVLDYREVNKTIPLIAAQNQ | |
| | HSAGILSSIYRGKYKTTLDLINGFWAHPITPESYWLTAFTWQGKQYCW | |
| | TRLPQGFLNSPALFNADVVDLLKEIPNVQAYVDDIYISHDDPQEHLEQ | |
| | LEKIFSILLNAGYVVSLKKSEIAQREVEFLGFNITKEGRGLTDTFKQK | |
| | LLNITPPKDLKQLQSILGLLNFARNFIPNYSELVKPLYTIVAPANGKF | |
| | ISWTEDNSNQLQHIISVLNQADNLEERNPETRLIIKVNSSPSAGYIRY | |
| | YNEGSKRPIMYVNYIFSKAEAKFTQTEKLLTTMHKGLIKAMDLAMGQE | |
| | ILVYSPIVSMTKIQRTPLPERKALPVRWITWMTYLEDPRIQFHYDKSL | |
| | PELQQIPNVTEDVIAKTKHPSEFAMVFYTDGSAIKHPDVNKSHSAGMG | |
| | IAQVQFIPEYKIVHQWSIPLGDHTAQLAEIAAVEFACKKALKISGPVL | |
| | IVTDSFYVAESANKELPYWKSNGFLNNKKKPLRHVSKWKSIAECLQLK | |
| | PDIIIMHEKGHQQPMTTLHTEGNNLADKLATQGSYVVH | |
| SFV1_P23074- | VPWLMKKPLQLTVLVPLHEYQERLLQQTALPKEQKELLQKLFLKYDAL | 438 |
| Pro_2mutA | WQHWENQVGHRRIKPHNIATGTLAPRPQKQYPINPKAKPSIQIVIDDL | |
| | LKQGVLIQQNSTMNTPVYPVPKPDGKWRMVLDYREVNKTIPLIAAQNQ | |
| | HSAGILSSIYRGKYKTTLDLINGFWAHPITPESYWLTAFTWQGKQYCW | |
| | TRLPQGELNSPALFNADVVDLLKEIPNVQAYVDDIYISHDDPQEHLEQ | |
| | LEKIFSILLNAGYVVSLKKSEIAQREVEFLGENITKEGRGLTDTFKQK | |
| | LLNITPPKDLKQLQSILGKLNFARNFIPNYSELVKPLYTIVAPANGKF | |
| | ISWTEDNSNQLQHIISVLNQADNLEERNPETRLIIKVNSSPSAGYIRY | |
| | YNEGSKRPIMYVNYIFSKAEAKFTQTEKLLTTMHKGLIKAMDLAMGQE | |
| | ILVYSPIVSMTKIQRTPLPERKALPVRWITWMTYLEDPRIQFHYDKSL | |
| | PELQQIPNVTEDVIAKTKHPSEFAMVFYTDGSAIKHPDVNKSHSAGMG | |
| | IAQVQFIPEYKIVHQWSIPLGDHTAQLAEIAAVEFACKKALKISGPVL | |
| | IVTDSFYVAESANKELPYWKSNGFLNNKKKPLRHVSKWKSIAECLQLK | |
| | PDIIIMHEKGHQQPMTTLHTEGNNLADKLATQGSYVVH | |
| SFV3L_P27401 | MDPLQLLQPLEAEIKGTKLKAHWNSGATITCVPQAFLEEEVPIKNIWI | 439 |
| | KTIHGEKEQPVYYLTFKIQGRKVEAEVISSPYDYILVSPSDIPWLMKK | |
| | PLQLTTLVPLQEYEERLLKQTMLTGSYKEKLQSLFLKYDALWQHWENQ | |
| | VGHRRIKPHHIATGTVNPRPQKQYPINPKAKASIQTVINDLLKQGVLI | |
| | QQNSIMNTPVYPVPKPDGKWRMVLDYREVNKTIPLIAAQNQHSAGILS | |
| | SIFRGKYKTTLDLSNGFWAHSITPESYWLTAFTWLGQQYCWTRLPQGE | |
| | LNSPALFTADVVDLLKEVPNVQVYVDDIYISHDDPREHLEQLEKVESL | |
| | LLNAGYVVSLKKSEIAQHEVEFLGFNITKEGRGLTETFKQKLLNITPP | |
| | RDLKQLQSILGLLNFARNFIPNFSELVKPLYNIIATANGKYITWTTDN | |
| | SQQLQNIISMLNSAENLEERNPEVRLIMKVNTSPSAGYIRFYNEFAKR | |
| | PIMYLNYVYTKAEVKFTNTEKLLTTIHKGLIKALDLGMGQEILVYSPI | |
| | VSMTKIQKTPLPERKALPIRWITWMSYLEDPRIQFHYDKTLPELQQVP | |
| | TVTDDIIAKIKHPSEFSMVFYTDGSAIKHPNVNKSHNAGMGIAQVQFK | |
| | PEFTVINTWSIPLGDHTAQLAEVAAVEFACKKALKIDGPVLIVTDSFY | |
| | VAESVNKELPYWQSNGFFNNKKKPLKHVSKWKSIADCIQLKPDIIIIH | |
| | EKGHQPTASTFHTEGNNLADKLATQGSYVVN | |
| SFV3L_P27401_ | MDPLQLLQPLEAEIKGTKLKAHWNSGATITCVPQAFLEEEVPIKNIWI | 440 |
| 2mut | KTIHGEKEQPVYYLTFKIQGRKVEAEVISSPYDYILVSPSDIPWLMKK | |
| | PLQLTTLVPLQEYEERLLKQTMLTGSYKEKLQSLFLKYDALWQHWENQ | |
| | VGHRRIKPHHIATGTVNPRPQKQYPINPKAKASIQTVINDLLKQGVLI | |
| | QQNSIMNTPVYPVPKPDGKWRMVLDYREVNKTIPLIAAQNQHSAGILS | |
| | SIFRGKYKTTLDLSNGFWAHSITPESYWLTAFTWLGQQYCWTRLPQGF | |
| | LNSPALFNADVVDLLKEVPNVQVYVDDIYISHDDPREHLEQLEKVESL | |
| | LLNAGYVVSLKKSEIAQHEVEFLGFNITKEGRGLTETFKQKLLNITPP | |
| | RDLKQLQSILGLLNFARNFIPNFSELVKPLYNIIATAPGKYITWTTDN | |
| | SQQLQNIISMLNSAENLEERNPEVRLIMKVNTSPSAGYIRFYNEFAKR | |
| | PIMYLNYVYTKAEVKFTNTEKLLTTIHKGLIKALDLGMGQEILVYSPI | |
| | VSMTKIQKTPLPERKALPIRWITWMSYLEDPRIQFHYDKTLPELQQVP | |
| | TVTDDIIAKIKHPSEFSMVFYTDGSAIKHPNVNKSHNAGMGIAQVQFK | |
| | PEFTVINTWSIPLGDHTAQLAEVAAVEFACKKALKIDGPVLIVTDSFY | |
| | VAESVNKELPYWQSNGFFNNKKKPLKHVSKWKSIADCIQLKPDIIIIH | |
| | EKGHQPTASTFHTEGNNLADKLATQGSYVVN | |
| SFV3L_P27401_ | MDPLQLLQPLEAEIKGTKLKAHWNSGATITCVPQAFLEEEVPIKNIWI | 441 |
| 2mutA | KTIHGEKEQPVYYLTFKIQGRKVEAEVISSPYDYILVSPSDIPWLMKK | |
| | PLQLTTLVPLQEYEERLLKQTMLTGSYKEKLQSLFLKYDALWQHWENQ | |
| | VGHRRIKPHHIATGTVNPRPQKQYPINPKAKASIQTVINDLLKQGVLI | |
| | QQNSIMNTPVYPVPKPDGKWRMVLDYREVNKTIPLIAAQNQHSAGILS | |
| | SIFRGKYKTTLDLSNGFWAHSITPESYWLTAFTWLGQQYCWTRLPQGF | |
| | LNSPALFNADVVDLLKEVPNVQVYVDDIYISHDDPREHLEQLEKVESL | |
| | LLNAGYVVSLKKSEIAQHEVEFLGFNITKEGRGLTETFKQKLLNITPP | |
| | RDLKQLQSILGKLNFARNFIPNFSELVKPLYNIIATAPGKYITWTTDN | |
| | SQQLQNIISMLNSAENLEERNPEVRLIMKVNTSPSAGYIRFYNEFAKR | |
| | PIMYLNYVYTKAEVKFTNTEKLLTTIHKGLIKALDLGMGQEILVYSPI | |
| | VSMTKIQKTPLPERKALPIRWITWMSYLEDPRIQFHYDKTLPELQQVP | |
| | TVTDDIIAKIKHPSEFSMVFYTDGSAIKHPNVNKSHNAGMGIAQVQFK | |
| | PEFTVINTWSIPLGDHTAQLAEVAAVEFACKKALKIDGPVLIVTDSFY | |
| | VAESVNKELPYWQSNGFFNNKKKPLKHVSKWKSIADCIQLKPDIIIIH | |
| | EKGHQPTASTFHTEGNNLADKLATQGSYVVN | |
| SFV3L_P27401- | IPWLMKKPLQLTTLVPLQEYEERLLKQTMLTGSYKEKLQSLFLKYDAL | 442 |
| Pro | WQHWENQVGHRRIKPHHIATGTVNPRPQKQYPINPKAKASIQTVINDL | |
| | LKQGVLIQQNSIMNTPVYPVPKPDGKWRMVLDYREVNKTIPLIAAQNQ | |
| | HSAGILSSIFRGKYKTTLDLSNGFWAHSITPESYWLTAFTWLGQQYCW | |
| | TRLPQGFLNSPALFTADVVDLLKEVPNVQVYVDDIYISHDDPREHLEQ | |
| | LEKVFSLLLNAGYVVSLKKSEIAQHEVEFLGFNITKEGRGLTETFKQK | |
| | LLNITPPRDLKQLQSILGLLNFARNFIPNFSELVKPLYNIIATANGKY | |
| | ITWTTDNSQQLQNIISMLNSAENLEERNPEVRLIMKVNTSPSAGYIRF | |
| | YNEFAKRPIMYLNYVYTKAEVKFTNTEKLLTTIHKGLIKALDLGMGQE | |
| | ILVYSPIVSMTKIQKTPLPERKALPIRWITWMSYLEDPRIQFHYDKTL | |
| | PELQQVPTVTDDIIAKIKHPSEFSMVFYTDGSAIKHPNVNKSHNAGMG | |
| | IAQVQFKPEFTVINTWSIPLGDHTAQLAEVAAVEFACKKALKIDGPVL | |
| | IVTDSFYVAESVNKELPYWQSNGFFNNKKKPLKHVSKWKSIADCIQLK | |
| | PDIIIIHEKGHQPTASTFHTEGNNLADKLATQGSYVVN | |
| SFV3L_P27401- | IPWLMKKPLQLTTLVPLQEYEERLLKQTMLTGSYKEKLQSLFLKYDAL | 443 |
| Pro_2mut | WQHWENQVGHRRIKPHHIATGTVNPRPQKQYPINPKAKASIQTVINDL | |
| | LKQGVLIQQNSIMNTPVYPVPKPDGKWRMVLDYREVNKTIPLIAAQNQ | |
| | HSAGILSSIFRGKYKTTLDLSNGFWAHSITPESYWLTAFTWLGQQYCW | |
| | TRLPQGFLNSPALFNADVVDLLKEVPNVQVYVDDIYISHDDPREHLEQ | |
| | LEKVFSLLLNAGYVVSLKKSEIAQHEVEFLGFNITKEGRGLTETFKQK | |
| | LLNITPPRDLKQLQSILGLLNFARNFIPNFSELVKPLYNIIATAPGKY | |
| | ITWTTDNSQQLQNIISMLNSAENLEERNPEVRLIMKVNTSPSAGYIRF | |
| | YNEFAKRPIMYLNYVYTKAEVKFTNTEKLLTTIHKGLIKALDLGMGQE | |
| | ILVYSPIVSMTKIQKTPLPERKALPIRWITWMSYLEDPRIQFHYDKTL | |
| | PELQQVPTVTDDIIAKIKHPSEFSMVFYTDGSAIKHPNVNKSHNAGMG | |
| | IAQVQFKPEFTVINTWSIPLGDHTAQLAEVAAVEFACKKALKIDGPVL | |
| | IVTDSFYVAESVNKELPYWQSNGFFNNKKKPLKHVSKWKSIADCIQLK | |
| | PDIIIIHEKGHQPTASTFHTEGNNLADKLATQGSYVVN | |
| SFV3L_P27401- | IPWLMKKPLQLTTLVPLQEYEERLLKQTMLTGSYKEKLQSLFLKYDAL | 444 |
| Pro_2mutA | WQHWENQVGHRRIKPHHIATGTVNPRPQKQYPINPKAKASIQTVINDL | |
| | LKQGVLIQQNSIMNTPVYPVPKPDGKWRMVLDYREVNKTIPLIAAQNQ | |
| | HSAGILSSIFRGKYKTTLDLSNGFWAHSITPESYWLTAFTWLGQQYCW | |
| | TRLPQGFLNSPALFNADVVDLLKEVPNVQVYVDDIYISHDDPREHLEQ | |
| | LEKVFSLLLNAGYVVSLKKSEIAQHEVEFLGFNITKEGRGLTETFKQK | |
| | LLNITPPRDLKQLQSILGKLNFARNFIPNFSELVKPLYNIIATAPGKY | |
| | ITWTTDNSQQLQNIISMLNSAENLEERNPEVRLIMKVNTSPSAGYIRF | |
| | YNEFAKRPIMYLNYVYTKAEVKFTNTEKLLTTIHKGLIKALDLGMGQE | |
| | ILVYSPIVSMTKIQKTPLPERKALPIRWITWMSYLEDPRIQFHYDKTL | |
| | PELQQVPTVTDDIIAKIKHPSEFSMVFYTDGSAIKHPNVNKSHNAGMG | |
| | IAQVQFKPEFTVINTWSIPLGDHTAQLAEVAAVEFACKKALKIDGPVL | |
| | IVTDSFYVAESVNKELPYWQSNGFFNNKKKPLKHVSKWKSIADCIQLK | |
| | PDIIIIHEKGHQPTASTFHTEGNNLADKLATQGSYVVN | |
| SFVCP_Q87040 | MNPLQLLQPLPAEVKGTKLLAHWNSGATITCIPESFLEDEQPIKQTLI | 445 |
| | KTIHGEKQQNVYYLTFKVKGRKVEAEVIASPYEYILLSPTDVPWLTQQ | |
| | PLQLTILVPLQEYQDRILNKTALPEEQKQQLKALFTKYDNLWQHWENQ | |
| | VGHRKIRPHNIATGDYPPRPQKQYPINPKAKPSIQIVIDDLLKQGVLT | |
| | PQNSTMNTPVYPVPKPDGRWRMVLDYREVNKTIPLTAAQNQHSAGILA | |
| | TIVRQKYKTTLDLANGFWAHPITPDSYWLTAFTWQGKQYCWTRLPQGF | |
| | LNSPALFTADAVDLLKEVPNVQVYVDDIYLSHDNPHEHIQQLEKVFQI | |
| | LLQAGYVVSLKKSEIGQRTVEFLGFNITKEGRGLTDTFKTKLLNVTPP | |
| | KDLKQLQSILGLLNFARNFIPNFAELVQTLYNLIASSKGKYIEWTEDN | |
| | TKQLNKVIEALNTASNLEERLPDQRLVIKVNTSPSAGYVRYYNESGKK | |
| | PIMYLNYVFSKAELKFSMLEKLLTTMHKALIKAMDLAMGQEILVYSPI | |
| | VSMTKIQKTPLPERKALPIRWITWMTYLEDPRIQFHYDKTLPELKHIP | |
| | DVYTSSIPPLKHPSQYEGVFCTDGSAIKSPDPTKSNNAGMGIVHAIYN | |
| | PEYKILNQWSIPLGHHTAQMAEIAAVEFACKKALKVPGPVLVITDSFY | |
| | VAESANKELPYWKSNGFVNNKKEPLKHISKWKSIAECLSIKPDITIQH | |
| | EKGHQPINTSIHTEGNALADKLATQGSYVVN | |
| SFVCP_Q87040_ | MNPLQLLQPLPAEVKGTKLLAHWNSGATITCIPESFLEDEQPIKQTLI | 446 |
| 2mut | KTIHGEKQQNVYYLTFKVKGRKVEAEVIASPYEYILLSPTDVPWLTQQ | |
| | PLQLTILVPLQEYQDRILNKTALPEEQKQQLKALFTKYDNLWQHWENQ | |
| | VGHRKIRPHNIATGDYPPRPQKQYPINPKAKPSIQIVIDDLLKQGVLT | |
| | PQNSTMNTPVYPVPKPDGRWRMVLDYREVNKTIPLTAAQNQHSAGILA | |
| | TIVRQKYKTTLDLANGFWAHPITPDSYWLTAFTWQGKQYCWTRLPQGF | |
| | LNSPALFNADAVDLLKEVPNVQVYVDDIYLSHDNPHEHIQQLEKVFQI | |
| | LLQAGYVVSLKKSEIGQRTVEFLGFNITKEGRGLTDTFKTKLLNVTPP | |
| | KDLKQLQSILGLLNFARNFIPNFAELVQTLYNLIASSPGKYIEWTEDN | |
| | TKQLNKVIEALNTASNLEERLPDQRLVIKVNTSPSAGYVRYYNESGKK | |
| | PIMYLNYVFSKAELKFSMLEKLLTTMHKALIKAMDLAMGQEILVYSPI | |
| | VSMTKIQKTPLPERKALPIRWITWMTYLEDPRIQFHYDKTLPELKHIP | |
| | DVYTSSIPPLKHPSQYEGVFCTDGSAIKSPDPTKSNNAGMGIVHAIYN | |
| | PEYKILNQWSIPLGHHTAQMAEIAAVEFACKKALKVPGPVLVITDSFY | |
| | VAESANKELPYWKSNGFVNNKKEPLKHISKWKSIAECLSIKPDITIQH | |
| | EKGHQPINTSIHTEGNALADKLATQGSYVVN | |
| SFVCP_Q87040_ | MNPLQLLQPLPAEVKGTKLLAHWNSGATITCIPESFLEDEQPIKQTLI | 447 |
| 2mutA | KTIHGEKQQNVYYLTFKVKGRKVEAEVIASPYEYILLSPTDVPWLTQQ | |
| | PLQLTILVPLQEYQDRILNKTALPEEQKQQLKALFTKYDNLWQHWENQ | |
| | VGHRKIRPHNIATGDYPPRPQKQYPINPKAKPSIQIVIDDLLKQGVLT | |
| | PQNSTMNTPVYPVPKPDGRWRMVLDYREVNKTIPLTAAQNQHSAGILA | |
| | TIVRQKYKTTLDLANGFWAHPITPDSYWLTAFTWQGKQYCWTRLPQGF | |
| | LNSPALFNADAVDLLKEVPNVQVYVDDIYLSHDNPHEHIQQLEKVFQI | |
| | LLQAGYVVSLKKSEIGQRTVEFLGFNITKEGRGLTDTFKTKLLNVTPP | |
| | KDLKQLQSILGKLNFARNFIPNFAELVQTLYNLIASSPGKYIEWTEDN | |
| | TKQLNKVIEALNTASNLEERLPDQRLVIKVNTSPSAGYVRYYNESGKK | |
| | PIMYLNYVFSKAELKFSMLEKLLTTMHKALIKAMDLAMGQEILVYSPI | |
| | VSMTKIQKTPLPERKALPIRWITWMTYLEDPRIQFHYDKTLPELKHIP | |
| | DVYTSSIPPLKHPSQYEGVFCTDGSAIKSPDPTKSNNAGMGIVHAIYN | |
| | PEYKILNQWSIPLGHHTAQMAEIAAVEFACKKALKVPGPVLVITDSFY | |
| | VAESANKELPYWKSNGFVNNKKEPLKHISKWKSIAECLSIKPDITIQH | |
| | EKGHQPINTSIHTEGNALADKLATQGSYVVN | |
| SFVCP_Q87040- | VPWLTQQPLQLTILVPLQEYQDRILNKTALPEEQKQQLKALFTKYDNL | 448 |
| Pro | WQHWENQVGHRKIRPHNIATGDYPPRPQKQYPINPKAKPSIQIVIDDL | |
| | LKQGVLTPQNSTMNTPVYPVPKPDGRWRMVLDYREVNKTIPLTAAQNQ | |
| | HSAGILATIVRQKYKTTLDLANGFWAHPITPDSYWLTAFTWQGKQYCW | |
| | TRLPQGFLNSPALFTADAVDLLKEVPNVQVYVDDIYLSHDNPHEHIQQ | |
| | LEKVFQILLQAGYVVSLKKSEIGQRTVEFLGFNITKEGRGLTDTFKTK | |
| | LLNVTPPKDLKQLQSILGLLNFARNFIPNFAELVQTLYNLIASSKGKY | |
| | IEWTEDNTKQLNKVIEALNTASNLEERLPDQRLVIKVNTSPSAGYVRY | |
| | YNESGKKPIMYLNYVFSKAELKFSMLEKLLTTMHKALIKAMDLAMGQE | |
| | ILVYSPIVSMTKIQKTPLPERKALPIRWITWMTYLEDPRIQFHYDKTL | |
| | PELKHIPDVYTSSIPPLKHPSQYEGVFCTDGSAIKSPDPTKSNNAGMG | |
| | IVHAIYNPEYKILNQWSIPLGHHTAQMAEIAAVEFACKKALKVPGPVL | |
| | VITDSFYVAESANKELPYWKSNGFVNNKKEPLKHISKWKSIAECLSIK | |
| | PDITIQHEKGHQPINTSIHTEGNALADKLATQGSYVVN | |
| SFVCP_Q87040- | VPWLTQQPLQLTILVPLQEYQDRILNKTALPEEQKQQLKALFTKYDNL | 449 |
| Pro_2mut | WQHWENQVGHRKIRPHNIATGDYPPRPQKQYPINPKAKPSIQIVIDDL | |
| | LKQGVLTPQNSTMNTPVYPVPKPDGRWRMVLDYREVNKTIPLTAAQNQ | |
| | HSAGILATIVRQKYKTTLDLANGFWAHPITPDSYWLTAFTWQGKQYCW | |
| | TRLPQGFLNSPALFNADAVDLLKEVPNVQVYVDDIYLSHDNPHEHIQQ | |
| | LEKVFQILLQAGYVVSLKKSEIGQRTVEFLGFNITKEGRGLTDTFKTK | |
| | LLNVTPPKDLKQLQSILGLLNFARNFIPNFAELVQTLYNLIASSPGKY | |
| | IEWTEDNTKQLNKVIEALNTASNLEERLPDQRLVIKVNTSPSAGYVRY | |
| | YNESGKKPIMYLNYVFSKAELKFSMLEKLLTTMHKALIKAMDLAMGQE | |
| | ILVYSPIVSMTKIQKTPLPERKALPIRWITWMTYLEDPRIQFHYDKTL | |
| | PELKHIPDVYTSSIPPLKHPSQYEGVFCTDGSAIKSPDPTKSNNAGMG | |
| | IVHAIYNPEYKILNQWSIPLGHHTAQMAEIAAVEFACKKALKVPGPVL | |
| | VITDSFYVAESANKELPYWKSNGFVNNKKEPLKHISKWKSIAECLSIK | |
| | PDITIQHEKGHQPINTSIHTEGNALADKLATQGSYVVN | |
| SFVCP_Q87040- | VPWLTQQPLQLTILVPLQEYQDRILNKTALPEEQKQQLKALFTKYDNL | 450 |
| Pro_2mutA | WQHWENQVGHRKIRPHNIATGDYPPRPQKQYPINPKAKPSIQIVIDDL | |
| | LKQGVLTPQNSTMNTPVYPVPKPDGRWRMVLDYREVNKTIPLTAAQNQ | |
| | HSAGILATIVRQKYKTTLDLANGFWAHPITPDSYWLTAFTWQGKQYCW | |
| | TRLPQGFLNSPALFNADAVDLLKEVPNVQVYVDDIYLSHDNPHEHIQQ | |
| | LEKVFQILLQAGYVVSLKKSEIGQRTVEFLGFNITKEGRGLTDTFKTK | |
| | LLNVTPPKDLKQLQSILGKLNFARNFIPNFAELVQTLYNLIASSPGKY | |
| | IEWTEDNTKQLNKVIEALNTASNLEERLPDQRLVIKVNTSPSAGYVRY | |
| | YNESGKKPIMYLNYVFSKAELKFSMLEKLLTTMHKALIKAMDLAMGQE | |
| | ILVYSPIVSMTKIQKTPLPERKALPIRWITWMTYLEDPRIQFHYDKTL | |
| | PELKHIPDVYTSSIPPLKHPSQYEGVFCTDGSAIKSPDPTKSNNAGMG | |
| | IVHAIYNPEYKILNQWSIPLGHHTAQMAEIAAVEFACKKALKVPGPVL | |
| | VITDSFYVAESANKELPYWKSNGFVNNKKEPLKHISKWKSIAECLSIK | |
| | PDITIQHEKGHQPINTSIHTEGNALADKLATQGSYVVN | |
| SMRVH_P03364 | PRSRAIDIPVPHADKISWKITDPVWVDQWPLTYEKTLAAIALVQEQLA | 451 |
| | AGHIEPTNSPWNTPIFIIKKKSGSWRLLQDLRAVNKVMVPMGALQPGL | |
| | PSPVAIPLNYHKIVIDLKDCFFTIPLHPEDRPYFAFSVPQINFQSPMP | |
| | RYQWKVLPQGMANSPTLCQKFVAAAIAPVRSQWPEAYILHYMDDILLA | |
| | CDSAEAAKACYAHIISCLTSYGLKIAPDKVQVSEPFSYLGFELHHQQV | |
| | FTPRVCLKTDHLKTLNDFQKLLGDIQWLRPYLKLPTSALVPLNNILKG | |
| | DPNPLSVRALTPEAKQSLALINKAIQNQSVQQISYNLPLVLLLLPTPH | |
| | TPTAVFWQPNGTDPTKNGSPLLWLHLPASPSKVLLTYPSLLAMLIIKG | |
| | RYTGRQLFGRDPHSIIIPYTQDQLTWLLQTSDEWAIALSSFTGDIDNH | |
| | YPSDPVIQFAKLHQFIFPKITKCAPIPQATLVFTDGSSNGIAAYVIDN | |
| | QPISIKSPYLSAQLVELYAILQVFTVLAHQPENLYTDSAYIAQSVPLL | |
| | ETVPFIKSSTNATPLFSKLQQLILNRQHPFFIGHLRAHLNLPGPLAEG | |
| | NALADAATQIFPIISD | |
| SMRVH_P03364_ | PRSRAIDIPVPHADKISWKITDPVWVDQWPLTYEKTLAAIALVQEQLA | 452 |
| 2mut | AGHIEPTNSPWNTPIFIIKKKSGSWRLLQDLRAVNKVMVPMGALQPGL | |
| | PSPVAIPLNYHKIVIDLKDCFFTIPLHPEDRPYFAFSVPQINFQSPMP | |
| | RYQWKVLPQGMANSPTLCQKFVAAAIAPVRSQWPEAYILHYMDDILLA | |
| | CDSAEAAKACYAHIISCLTSYGLKIAPDKVQVSEPFSYLGFELHHQQV | |
| | FTPRVCLKTDHLKTLNDFQKLLGDIQWLRPYLKLPTSALVPLNNILKP | |
| | DPNPLSVRALTPEAKQSLALINKAIQNQSVQQISYNLPLVLLLLPTPH | |
| | TPTAVFWQPNGTDPTKNGSPLLWLHLPASPSKVLLTYPSLLAMLIIKG | |
| | RYTGRQLFGRDPHSIIIPYTQDQLTWLLQTSDEWAIALSSFTGDIDNH | |
| | YPSDPVIQFAKLHQFIFPKITKCAPIPQATLVFTDGSSNGIAAYVIDN | |
| | QPISIKSPYLSAQLVELYAILQVFTVLAHQPENLYTDSAYIAQSVPLL | |
| | ETVPFIKSSTNATPLFSKLQQLILNRQHPFFIGHLRAHLNLPGPLAEG | |
| | NALADAATQIFPIISD | |
| SMRVH_P03364_ | PRSRAIDIPVPHADKISWKITDPVWVDQWPLTYEKTLAAIALVQEQLA | 453 |
| 2mutB | AGHIEPTNSPWNTPIFIIKKKSGSWRLLQDLRAVNKVMVPMGALQPGL | |
| | PSPVAPPLNYHKIVIDLKDCFFTIPLHPEDRPYFAFSVPQINFQSPMP | |
| | RYQWKVLPQGMANSPTLCQKFVAAAIAPVRSQWPEAYILHYMDDILLA | |
| | CDSAEAAKACYAHIISCLTSYGLKIAPDKVQVSEPFSYLGFELHHQQV | |
| | FTPRVCLKTDHLKTLNDFQKLLGDIQWLRPYLKLPTSALVPLNNILKP | |
| | DPNPLSVRALTPEAKQSLALINKAIQNQSVQQISYNLPLVLLLLPTPH | |
| | TPTAVFWQPNGTDPTKNGSPLLWLHLPASPSKVLLTYPSLLAMLIIKG | |
| | RYTGRQLFGRDPHSIIIPYTQDQLTWLLQTSDEWAIALSSFTGDIDNH | |
| | YPSDPVIQFAKLHQFIFPKITKCAPIPQATLVFTDGSSNGIAAYVIDN | |
| | QPISIKSPYLSAQLVELYAILQVFTVLAHQPENLYTDSAYIAQSVPLL | |
| | ETVPFIKSSTNATPLFSKLQQLILNRQHPFFIGHLRAHLNLPGPLAEG | |
| | NALADAATQIFPIISD | |
| SRV2_P51517 | LATAVDILAPQRYADPITWKSDEPVWVDQWPLTQEKLAAAQQLVQEQL | 454 |
| | QAGHIIESNSPWNTPIFVIKKKSGKWRLLQDLRAVNATMVLMGALQPG | |
| | LPSPVAIPQGYFKIVIDLKDCFFTIPLQPVDQKRFAFSLPSTNFKQPM | |
| | KRYQWKVLPQGMANSPTLCQKYVAAAIEPVRKSWAQMYIIHYMDDILI | |
| | AGKLGEQVLQCFAQLKQALTTTGLQIAPEKVQLQDPYTYLGFQINGPK | |
| | ITNQKAVIRRDKLQTLNDFQKLLGDINWLRPYLHLTTGDLKPLFDILK | |
| | GDSNPNSPRSLSEAALASLQKVETAIAEQFVTQIDYTQPLTFLIFNTT | |
| | LTPTGLFWQNNPVMWVHLPASPKKVLLPYYDAIADLIILGRDNSKKYF | |
| | GLEPSTIIQPYSKSQIHWLMQNTETWPIACASYAGNIDNHYPPNKLIQ | |
| | FCKLHAVVFPRIISKTPLDNALLVFTDGSSTGIAAYTFEKTTVRFKTS | |
| | HTSAQLVELQALIAVLSAFPHRALNVYTDSAYLAHSIPLLETVSHIKH | |
| | ISDTAKFFLQCQQLIYNRSIPFYLGHIRAHSGLPGPLSQGNHITDLAT | |
| | KVVATTLTT | |
| SRV2_P51517_ | LATAVDILAPQRYADPITWKSDEPVWVDQWPLTQEKLAAAQQLVQEQL | 455 |
| 2mutB | QAGHIIESNSPWNTPIFVIKKKSGKWRLLQDLRAVNATMVLMGALQPG | |
| | LPSPVAPPQGYFKIVIDLKDCFFTIPLQPVDQKRFAFSLPSTNFKQPM | |
| | KRYQWKVLPQGMANSPTLCQKYVAAAIEPVRKSWAQMYIIHYMDDILI | |
| | AGKLGEQVLQCFAQLKQALTTTGLQIAPEKVQLQDPYTYLGFQINGPK | |
| | ITNQKAVIRRDKLQTLNDFQKLLGDINWLRPYLHLTTGDLKPLFDILK | |
| | GDSNPNSPRSLSEAALASLQKVETAIAEQFVTQIDYTQPLTFLIFNTT | |
| | LTPTGLFWQNNPVMWVHLPASPKKVLLPYYDAIADLIILGRDNSKKYF | |
| | GLEPSTIIQPYSKSQIHWLMQNTETWPIACASYAGNIDNHYPPNKLIQ | |
| | FCKLHAVVFPRIISKTPLDNALLVFTDGSSTGIAAYTFEKTTVRFKTS | |
| | HTSAQLVELQALIAVLSAFPHRALNVYTDSAYLAHSIPLLETVSHIKH | |
| | ISDTAKFFLQCQQLIYNRSIPFYLGHIRAHSGLPGPLSQGNHITDLAT | |
| | KVVATTLTT | |
| WDSV_O92815 | SCQTKNTLNIDEYLLQFPDQLWASLPTDIGRMLVPPITIKIKDNASLP | 456 |
| | SIRQYPLPKDKTEGLRPLISSLENQGILIKCHSPCNTPIFPIKKAGRD | |
| | EYRMIHDLRAINNIVAPLTAVVASPTTVLSNLAPSLHWFTVIDLSNAF | |
| | FSVPIHKDSQYLFAFTFEGHQYTWTVLPQGFIHSPTLFSQALYQSLHK | |
| | IKFKISSEICIYMDDVLIASKDRDTNLKDTAVMLQHLASEGHKVSKKK | |
| | LQLCQQEVVYLGQLLTPEGRKILPDRKVTVSQFQQPTTIRQIRAFLGL | |
| | VGYCRHWIPEFSIHSKFLEKQLKKDTAEPFQLDDQQVEAFNKLKHAIT | |
| | TAPVLVVPDPAKPFQLYTSHSEHASIAVLTQKHAGRTRPIAFLSSKFD | |
| | AIESGLPPCLKACASIHRSLTQADSFILGAPLIIYTTHAICTLLQRDR | |
| | SQLVTASRFSKWEADLLRPELTFVACSAVSPAHLYMQSCENNIPPHDC | |
| | VLLTHTISRPRPDLSDLPIPDPDMTLFSDGSYTTGRGGAAVVMHRPVT | |
| | DDFIIIHQQPGGASAQTAELLALAAACHLATDKTVNIYTDSRYAYGVV | |
| | HDFGHLWMHRGFVTSAGTPIKNHKEIEYLLKQIMKPKQVSVIKIEAHT | |
| | KGVSMEVRGNAAADEAAKNAVFLVQR | |
| WDSV_O92815_ | SCQTKNTLNIDEYLLQFPDQLWASLPTDIGRMLVPPITIKIKDNASLP | 457 |
| 2mut | SIRQYPLPKDKTEGLRPLISSLENQGILIKCHSPCNTPIFPIKKAGRD | |
| | EYRMIHDLRAINNIVAPLTAVVASPTTVLSNLAPSLHWFTVIDLSNAF | |
| | FSVPIHKDSQYLFAFTFEGHQYTWTVLPQGFIHSPTLFNQALYQSLHK | |
| | IKFKISSEICIYMDDVLIASKDRDTNLKDTAVMLQHLASEGHKVSKKK | |
| | LQLCQQEVVYLGQLLTPEGRKILPDRKVTVSQFQQPTTIRQIRAFLGL | |
| | VGYCRHWIPEFSIHSKFLEKQLKPDTAEPFQLDDQQVEAFNKLKHAIT | |
| | TAPVLVVPDPAKPFQLYTSHSEHASIAVLTQKHAGRTRPIAFLSSKED | |
| | AIESGLPPCLKACASIHRSLTQADSFILGAPLIIYTTHAICTLLQRDR | |
| | SQLVTASRFSKWEADLLRPELTFVACSAVSPAHLYMQSCENNIPPHDC | |
| | VLLTHTISRPRPDLSDLPIPDPDMTLFSDGSYTTGRGGAAVVMHRPVT | |
| | DDFIIIHQQPGGASAQTAELLALAAACHLATDKTVNIYTDSRYAYGVV | |
| | HDFGHLWMHRGFVTSAGTPIKNHKEIEYLLKQIMKPKQVSVIKIEAHT | |
| | KGVSMEVRGNAAADEAAKNAVELVQR | |
| WDSV_O92815_ | SCQTKNTLNIDEYLLQFPDQLWASLPTDIGRMLVPPITIKIKDNASLP | 458 |
| 2mutA | SIRQYPLPKDKTEGLRPLISSLENQGILIKCHSPCNTPIFPIKKAGRD | |
| | EYRMIHDLRAINNIVAPLTAVVASPTTVLSNLAPSLHWFTVIDLSNAF | |
| | FSVPIHKDSQYLFAFTFEGHQYTWTVLPQGFIHSPTLFNQALYQSLHK | |
| | IKFKISSEICIYMDDVLIASKDRDTNLKDTAVMLQHLASEGHKVSKKK | |
| | LQLCQQEVVYLGQLLTPEGRKILPDRKVTVSQFQQPTTIRQIRAFLGK | |
| | VGYCRHFIPEFSIHSKFLEKQLKPDTAEPFQLDDQQVEAFNKLKHAIT | |
| | TAPVLVVPDPAKPFQLYTSHSEHASIAVLTQKHAGRTRPIAFLSSKED | |
| | AIESGLPPCLKACASIHRSLTQADSFILGAPLIIYTTHAICTLLQRDR | |
| | SQLVTASRFSKWEADLLRPELTFVACSAVSPAHLYMQSCENNIPPHDC | |
| | VLLTHTISRPRPDLSDLPIPDPDMTLFSDGSYTTGRGGAAVVMHRPVT | |
| | DDFIIIHQQPGGASAQTAELLALAAACHLATDKTVNIYTDSRYAYGVV | |
| | HDFGHLWMHRGFVTSAGTPIKNHKEIEYLLKQIMKPKQVSVIKIEAHT | |
| | KGVSMEVRGNAAADEAAKNAVFLVQR | |
| WMSV_P03359 | VLNLEEEYRLHEKPVPSSIDPSWLQLFPTVWAERAGMGLANQVPPVVV | 459 |
| | ELRSGASPVAVRQYPMSKEAREGIRPHIQRFLDLGVLVPCQSPWNTPL | |
| | LPVKKPGTNDYRPVQDLREINKRVQDIHPTVPNPYNLLSSLPPSHTWY | |
| | SVLDLKDAFFCLKLHPNSQPLFAFEWRDPEKGNTGQLTWTRLPQGFKN | |
| | SPTLFDEALHRDLAPFRALNPQVVLLQYVDDLLVAAPTYRDCKEGTQK | |
| | LLQELSKLGYRVSAKKAQLCQKEVTYLGYLLKEGKRWLTPARKATVMK | |
| | IPPPTTPRQVREFLGTAGFCRLWIPGFASLAAPLYPLTKESIPFIWTE | |
| | EHQKAFDRIKEALLSAPALALPDLTKPFTLYVDERAGVARGVLTQTLG | |
| | PWRRPVAYLSKKLDPVASGWPTCLKAVAAVALLLKDADKLTLGQNVTV | |
| | IASHSLESIVRQPPDRWMTNARMTHYQSLLLNERVSFAPPAVLNPATL | |
| | LPVESEATPVHRCSEILAEETGTRRDLKDQPLPGVPAWYTDGSSFIAE | |
| | GKRRAGAAIVDGKRTVWASSLPEGTSAQKAELVALTQALRLAEGKDIN | |
| | IYTDSRYAFATAHIHGAIYKQRGLLTSAGKDIKNKEEILALLEAIHLP | |
| | KRVAIIHCPGHQKGNDPVATGNRRADEAAKQAALSTRVLAETTKP | |
| WMSV_P03359_ | VLNLEEEYRLHEKPVPSSIDPSWLQLFPTVWAERAGMGLANQVPPVVV | 460 |
| 3mut | ELRSGASPVAVRQYPMSKEAREGIRPHIQRFLDLGVLVPCQSPWNTPL | |
| | LPVKKPGTNDYRPVQDLREINKRVQDIHPTVPNPYNLLSSLPPSHTWY | |
| | SVLDLKDAFFCLKLHPNSQPLFAFEWRDPEKGNTGQLTWTRLPQGFKN | |
| | SPTLFNEALHRDLAPFRALNPQVVLLQYVDDLLVAAPTYRDCKEGTQK | |
| | LLQELSKLGYRVSAKKAQLCQKEVTYLGYLLKEGKRWLTPARKATVMK | |
| | IPPPTTPRQVREFLGTAGFCRLWIPGFASLAAPLYPLTKPSIPFIWTE | |
| | EHQKAFDRIKEALLSAPALALPDLTKPFTLYVDERAGVARGVLTQTLG | |
| | PWRRPVAYLSKKLDPVASGWPTCLKAVAAVALLLKDADKLTLGQNVTV | |
| | IASHSLESIVRQPPDRWMTNARMTHYQSLLLNERVSFAPPAVLNPATL | |
| | LPVESEATPVHRCSEILAEETGTRRDLKDQPLPGVPAWYTDGSSFIAE | |
| | GKRRAGAAIVDGKRTVWASSLPEGTSAQKAELVALTQALRLAEGKDIN | |
| | IYTDSRYAFATAHIHGAIYKQRGWLTSAGKDIKNKEEILALLEAIHLP | |
| | KRVAIIHCPGHQKGNDPVATGNRRADEAAKQAALSTRVLAETTKP | |
| WMSV_P03359_ | VLNLEEEYRLHEKPVPSSIDPSWLQLFPTVWAERAGMGLANQVPPVVV | 461 |
| 3mutA | ELRSGASPVAVRQYPMSKEAREGIRPHIQRFLDLGVLVPCQSPWNTPL | |
| | LPVKKPGTNDYRPVQDLREINKRVQDIHPTVPNPYNLLSSLPPSHTWY | |
| | SVLDLKDAFFCLKLHPNSQPLFAFEWRDPEKGNTGQLTWTRLPQGFKN | |
| | SPTLFNEALHRDLAPFRALNPQVVLLQYVDDLLVAAPTYRDCKEGTQK | |
| | LLQELSKLGYRVSAKKAQLCQKEVTYLGYLLKEGKRWLTPARKATVMK | |
| | IPPPTTPRQVREFLGKAGFCRLFIPGFASLAAPLYPLTKPSIPFIWTE | |
| | EHQKAFDRIKEALLSAPALALPDLTKPFTLYVDERAGVARGVLTQTLG | |
| | PWRRPVAYLSKKLDPVASGWPTCLKAVAAVALLLKDADKLTLGQNVTV | |
| | IASHSLESIVRQPPDRWMTNARMTHYQSLLLNERVSFAPPAVLNPATL | |
| | LPVESEATPVHRCSEILAEETGTRRDLKDQPLPGVPAWYTDGSSFIAE | |
| | GKRRAGAAIVDGKRTVWASSLPEGTSAQKAELVALTQALRLAEGKDIN | |
| | IYTDSRYAFATAHIHGAIYKQRGWLTSAGKDIKNKEEILALLEAIHLP | |
| | KRVAIIHCPGHQKGNDPVATGNRRADEAAKQAALSTRVLAETTKP | |
| XMRV6_A1Z651 | TLNIEDEYRLHETSKEPDVPLGSTWLSDFPQAWAETGGMGLAVRQAPL | 462 |
| | IIPLKATSTPVSIKQYPMSQEARLGIKPHIQRLLDQGILVPCQSPWNT | |
| | PLLPVKKPGTNDYRPVQDLREVNKRVEDIHPTVPNPYNLLSGLPPSHQ | |
| | WYTVLDLKDAFFCLRLHPTSQPLFAFEWRDPEMGISGQLTWTRLPQGF | |
| | KNSPTLFDEALHRDLADFRIQHPDLILLQYVDDLLLAATSEQDCQRGT | |
| | RALLQTLGNLGYRASAKKAQICQKQVKYLGYLLKEGQRWLTEARKETV | |
| | MGQPTPKTPRQLREFLGTAGFCRLWIPGFAEMAAPLYPLTKTGTLFNW | |
| | GPDQQKAYQEIKQALLTAPALGLPDLTKPFELFVDEKQGYAKGVLTQK | |
| | LGPWRRPVAYLSKKLDPVAAGWPPCLRMVAAIAVLTKDAGKLTMGQPL | |
| | VILAPHAVEALVKQPPDRWLSNARMTHYQAMLLDTDRVQFGPVVALNP | |
| | ATLLPLPEKEAPHDCLEILAETHGTRPDLTDQPIPDADYTWYTDGSSF | |
| | LQEGQRRAGAAVTTETEVIWARALPAGTSAQRAELIALTQALKMAEGK | |
| | KLNVYTDSRYAFATAHVHGEIYRRRGLLTSEGREIKNKNEILALLKAL | |
| | FLPKRLSIIHCPGHQKGNSAEARGNRMADQAAREAAMKAVLETSTLL | |
| XMRV6_A1Z651_ | TLNIEDEYRLHETSKEPDVPLGSTWLSDFPQAWAETGGMGLAVRQAPL | 463 |
| 3mut | IIPLKATSTPVSIKQYPMSQEARLGIKPHIQRLLDQGILVPCQSPWNT | |
| | PLLPVKKPGTNDYRPVQDLREVNKRVEDIHPTVPNPYNLLSGLPPSHQ | |
| | WYTVLDLKDAFFCLRLHPTSQPLFAFEWRDPEMGISGQLTWTRLPQGF | |
| | KNSPTLFNEALHRDLADFRIQHPDLILLQYVDDLLLAATSEQDCQRGT | |
| | RALLQTLGNLGYRASAKKAQICQKQVKYLGYLLKEGQRWLTEARKETV | |
| | MGQPTPKTPRQLREFLGTAGFCRLWIPGFAEMAAPLYPLTKPGTLENW | |
| | GPDQQKAYQEIKQALLTAPALGLPDLTKPFELFVDEKQGYAKGVLTQK | |
| | LGPWRRPVAYLSKKLDPVAAGWPPCLRMVAAIAVLTKDAGKLTMGQPL | |
| | VILAPHAVEALVKQPPDRWLSNARMTHYQAMLLDTDRVQFGPVVALNP | |
| | ATLLPLPEKEAPHDCLEILAETHGTRPDLTDQPIPDADYTWYTDGSSF | |
| | LQEGQRRAGAAVTTETEVIWARALPAGTSAQRAELIALTQALKMAEGK | |
| | KLNVYTDSRYAFATAHVHGEIYRRRGWLTSEGREIKNKNEILALLKAL | |
| | FLPKRLSIIHCPGHQKGNSAEARGNRMADQAAREAAMKAVLETSTLL | |
| XMRV6_A1Z651_ | TLNIEDEYRLHETSKEPDVPLGSTWLSDFPQAWAETGGMGLAVRQAPL | 464 |
| 3mutA | IIPLKATSTPVSIKQYPMSQEARLGIKPHIQRLLDQGILVPCQSPWNT | |
| | PLLPVKKPGTNDYRPVQDLREVNKRVEDIHPTVPNPYNLLSGLPPSHQ | |
| | WYTVLDLKDAFFCLRLHPTSQPLFAFEWRDPEMGISGQLTWTRLPQGF | |
| | KNSPTLFNEALHRDLADFRIQHPDLILLQYVDDLLLAATSEQDCQRGT | |
| | RALLQTLGNLGYRASAKKAQICQKQVKYLGYLLKEGQRWLTEARKETV | |
| | MGQPTPKTPRQLREFLGKAGFCRLFIPGFAEMAAPLYPLTKPGTLENW | |
| | GPDQQKAYQEIKQALLTAPALGLPDLTKPFELFVDEKQGYAKGVLTQK | |
| | LGPWRRPVAYLSKKLDPVAAGWPPCLRMVAAIAVLTKDAGKLTMGQPL | |
| | VILAPHAVEALVKQPPDRWLSNARMTHYQAMLLDTDRVQFGPVVALNP | |
| | ATLLPLPEKEAPHDCLEILAETHGTRPDLTDQPIPDADYTWYTDGSSF | |
| | LQEGQRRAGAAVTTETEVIWARALPAGTSAQRAELIALTQALKMAEGK | |
| | KLNVYTDSRYAFATAHVHGEIYRRRGWLTSEGREIKNKNEILALLKAL | |
| | FLPKRLSIIHCPGHQKGNSAEARGNRMADQAAREAAMKAVLETSTLL | |
| Marathon RT | MDTSNLMEQILSSDNLNRAYLQVVRNKGAEGVDGMKYTELKEHLAKNG | 464 |
| Group II Intron | ETIKGQLRTRKYKPQPARRVEIPKPDGGVRNLGVPTVTDRFIQQAIAQ | |
| CBK9229 | VLTPIYEEQFHDHSYGFRPNRCAQQAILTALNIMNDGNDWIVDIDLEK | |
| | FFDTVNHDKLMTLIGRTIKDGDVISIVRKYLVSGIMIDDEYEDSIVGT | |
| | PQGGNLSPLLANIMLNELDKEMEKRGLNFVRYADDCIIMVGSEMSANR | |
| | VMRNISRFIEEKLGLKVNMTKSKVDRPSGLKYLGFGFYFDPRAHQFKA | |
| | KPHAKSVAKFKKRMKELTCRSWGVSNSYKVEKLNQLIRGWINYFKIGS | |
| | MKTLCKELDSRIRYRLRMCIWKQWKTPQNQEKNLVKLGIDRNTARRVA | |
| | YTGKRIAYVCNKGAVNVAISNKRLASFGLISMLDYYIEKCVTC | |
| TGIRT, trt | MALLERILADRNLITALKRVEANQGAPGIGDVSTDQLRDIYRAHWSTI | 466 |
| Group II Intron | RAQLLAGTYRPAPVRRVGIPKGPGGTRQLGITPVVDRLIQQIALQELT | |
| AAAT7232 | PIFDPDFSPSSFGFRPGRNAHDAVRQAQGYIQEYGRYVVDMDLKEFFD | |
| | RVNHDLIMSRVARKVDKKRVLKLIRYALQAGVMIEGVKVQTEEGTQPG | |
| | GPLSPLLANILLDDLDKELEKRGLKFCYRADDCNIYVSKLRAGQRVKQ | |
| | SIQRFLEKTLKLKVNEEKSVADRPWKRAFGLFSFTPERKARIRLAPRS | |
| | IQRLKQRIRQLTNPNWSISMPREIHRVNQYVGMWIGYFRLVTEPSVLQ | |
| | TIEGWIRRRLRLCWQLQWKRVRTRIRELRALGLKETAVMEIANRTKGA | |
| | WRTTKPQTLHQALGKYTWTAQGLKTSLQRYFELRQG | |
| LtrA | MKPTMAILERISKNSQENIDEVFTRLYRYLLRPDIYYVAYQNLYSNKG | 467 |
| Group II Intron | ASTKGILDDTADGFSEEKIKKIIQSLKDGTYYPQPVRRMYIAKKNSKK | |
| AAB0650 | MRPLGIPTFTDKLIQEAVRIILESIYEPVFEDVSHGFRPQRSCHTALK | |
| | TIKREFGGARWFVEGDIKGCFDNIDHVTLIGLINLKIKDMKMSQLIYK | |
| | FLKAGYLENWQYHKTYSGTPQGGILSPLLANIYLHELDKFVLQLKMKF | |
| | DRESPERITPEYRELHNEIKRISHRLKKLEGEEKAKVLLEYQEKRKRL | |
| | PTLPCTSQTNKVLKYVRYADDFIISVKGSKEDCQWIKEQLKLFIHNKL | |
| | KMELSEEKTLITHSSQPARFLGYDIRVRRSGTIKRSGKVKKRTLNGSV | |
| | ELLIPLQDKIRQFIFDKKIAIQKKDSSWFPVHRKYLIRSTDLEIITIY | |
| | NSELRGICNYYGLASNFNQLNYFAYLMEYSCLKTIASKHKGTLSKTIS | |
| | MFKDGSGSWGIPYEIKQGKQRRYFANFSECKSPYQFTDEISQAPVLYG | |
| | YARNTLENRLKAKCCELCGTSDENTSYEIHHVNKVKNLKGKEKWEMAM | |
| | IAKQRKTLVVCFHCHRHVIHKHK | |
| R2Bm | MMASTALSLMGRCNPDGCTRGKHVTAAPMDGPRGPSSLAGTFGWGLAI | 468 |
| Non-LTR | PAGEPCGRVCSPATVGFFPVAKKSNKENRPEASGLPLESERTGDNPTV | |
| Retrotransposon | RGSAGADPVGQDAPGWTCQFCERTFSTNRGLGVHKRRAHPVETNTDAA | |
| AAB59214.1 | PMMVKRRWHGEEIDLLARTEARLLAERGQCSGGDLFGALPGFGRTLEA | |
| | IKGQRRREPYRALVQAHLARFGSQPGPSSGGCSAEPDFRRASGAEEAG | |
| | EERCAEDAAAYDPSAVGQMSPDAARVLSELLEGAGRRRACRAMRPKTA | |
| | GRRNDLHDDRTASAHKTSRQKRRAEYARVQELYKKCRSRAAAEVIDGA | |
| | CGGVGHSLEEMETYWRPILERVSDAPGPTPEALHALGRAEWHGGNRDY | |
| | TQLWKPISVEEIKASRFDWRTSPGPDGIRSGQWRAVPVHLKAEMFNAW | |
| | MARGEIPEILRQCRTVFVPKVERPGGPGEYRPISIASIPLRHFHSILA | |
| | RRLLACCPPDARQRGFICADGTLENSAVLDAVLGDSRKKLRECHVAVL | |
| | DFAKAFDTVSHEALVELLRLRGMPEQFCGYIAHLYDTASTTLAVNNEM | |
| | SSPVKVGRGVRQGDPLSPILFNVVMDLILASLPERVGYRLEMELVSAL | |
| | AYADDLVLLAGSKVGMQESISAVDCVGRQMGLRLNCRKSAVLSMIPDG | |
| | HRKKHHYLTERTFNIGGKPLRQVSCVERWRYLGVDFEASGCVTLEHSI | |
| | SSALNNISRAPLKPQQRLEILRAHLIPRFQHGFVLGNISDDRLRMLDV | |
| | QIRKAVGQWLRLPADVPKAYYHAAVQDGGLAIPSVRATIPDLIVRRFG | |
| | GLDSSPWSVARAAAKSDKIRKKLRWAWKQLRRFSRVDSTTQRPSVRLF | |
| | WREHLHASVDGRELRESTRTPTSTKWIRERCAQITGRDFVQFVHTHIN | |
| | ALPSRIRGSRGRRGGGESSLTCRAGCKVRETTAHILQQCHRTHGGRIL | |
| | RHNKIVSFVAKAMEENKWTVELEPRLRTSVGLRKPDIIASRDGVGVIV | |
| | DVQVVSGQRSLDELHREKRNKYGNHGELVELVAGRLGLPKAECVRATS | |
| | CTISWRGVWSLTSYKELRSIIGLREPTLQIVPILALRGSHMNWTRENQ | |
| | MTSVMGGGVG | |
| LINE-1 | MTGSNSHITILTLNVNGLNSPIKRHRLASWIKSQDPSVCCIQETHLTC | 469 |
| Non-LTR | RDTHRLKIKGWRKIYQANGKQKKAGVAILVSDKTDFKPTKIKRDKEGH | |
| Retrotransposon | YIMVKGSIQQEELTILNIYAPNTGAPRFIKQVLSDLQRDLDSHTLIMG | |
| AAC5127 | DFNTPLSILDRSTRQKVNKDTQELNSALHQTDLIDIYRTLHPKSTEYT | |
| | FFSAPHHTYSKIDHIVGSKALLSKCKRTEIITNYLSDHSAIKLELRIK | |
| | NLTQSRSTTWKLNNLLLNDYWVHNEMKAEIKMFFETNENKDTTYQNLW | |
| | DAFKAVCRGKFIALNAYKRKQERSKIDTLTSQLKELEKQEQTHSKASR | |
| | RQEITKIRAELKEIETQKTLQKINESRSWFFERINKIDRPLARLIKKK | |
| | REKNQIDTIKNDKGDITTDPTEIQTTIREYYKHLYANKLENLEEMDTF | |
| | LDTYTLPRLNQEEVESLNRPITGSEIVAIINSLPTKKSPGPDGFTAEF | |
| | YQRYKEELVPFLLKLFQSIEKEGILPNSFYEASIILIPKPGRDTTKKE | |
| | NFRPISLMNIDAKILNKILANRIQQHIKKLIHHDQVGFIPGMQGWENI | |
| | RKSINVIQHINRAKDKNHVIISIDAEKAFDKIQQPFMLKTLNKLGIDG | |
| | MYLKIIRAIYDKPTANIILNGQKLEAFPLKTGTRQGCPLSPLLFNIVL | |
| | EVLARAIRQEKEIKGIQLGKEEVKLSLFADDMIVYLENPIVSAQNLLK | |
| | LISNFSKVSGYKINVQKSQAFLYNNNRQTESQIMGELPFTIASKRIKY | |
| | LGIQLTRDVKDLFKENYKPLLKEIKEDTNKWKNIPCSWVGRINIVKMA | |
| | ILPKVIYRFNAIPIKLPMTFFTELEKTTLKFIWNQKRARIAKSILSQK | |
| | NKAGGITLPDFKLYYKATVTKTAWYWYQNRDIDQWNRTEPSEIMPHIY | |
| | NYLIFDKPEKNKQWGKDSLLNKWCWENWLAICRKLKLDPFLTPYTKIN | |
| | SRWIKDLNVKPKTIKTLEENLGITIQDIGVGKDFMSKTPKAMATKDKI | |
| | DKWDLIKLKSFCTAKETTIRVNRQPTTWEKIFATYSSDKGLISRIYNE | |
| | LKQIYKKKTNNPIKKWAKDMNRHFSKEDIYAAKKHMKKCSSSLAIREM | |
| | QIKTTMRYHLTPVRMAIIKKSGNNRCWRGCGEIGTLVHCWWDCKLVQP | |
| | LWKSVWRFLRDLELEIPFDPAIPLLGIYPKDYKSCCYKDTCTRMFIAA | |
| | LFTIAKTWNQPNCPTMIDWIKKMWHIYTMEYYAAIKNDEFISFVGTWM | |
| | KLETIILSKLSQEQKTKHRIFSLIGGN | |
| Penelope | MTGSNSHITILTLNVNGLNSPIKRHRLASWIKSQDPSVCCIQETHLTC | 470 |
| Non-LTR | RDTHRLKIKGWRKIYQANGKQKKAGVAILVSDKTDFKPTKIKRDKEGH | |
| Retrotransposon | YIMVKGSIQQEELTILNIYAPNTGAPRFIKQVLSDLQRDLDSHTLIMG | |
| AAL14979.1 | DENTPLSILDRSTRQKVNKDTQELNSALHQTDLIDIYRTLHPKSTEYT | |
| | FFSAPHHTYSKIDHIVGSKALLSKCKRTEIITNYLSDHSAIKLELRIK | |
| | NLTQSRSTTWKLNNLLLNDYWVHNEMKAEIKMFFETNENKDTTYQNLW | |
| | DAFKAVCRGKFIALNAYKRKQERSKIDTLTSQLKELEKQEQTHSKASR | |
| | RQEITKIRAELKEIETQKTLQKINESRSWFFERINKIDRPLARLIKKK | |
| | REKNQIDTIKNDKGDITTDPTEIQTTIREYYKHLYANKLENLEEMDTF | |
| | LDTYTLPRLNQEEVESLNRPITGSEIVAIINSLPTKKSPGPDGFTAEF | |
| | YQRYKEELVPFLLKLFQSIEKEGILPNSFYEASIILIPKPGRDTTKKE | |
| | NFRPISLMNIDAKILNKILANRIQQHIKKLIHHDQVGFIPGMQGWENI | |
| | RKSINVIQHINRAKDKNHVIISIDAEKAFDKIQQPFMLKTLNKLGIDG | |
| | MYLKIIRAIYDKPTANIILNGQKLEAFPLKTGTRQGCPLSPLLFNIVL | |
| | EVLARAIRQEKEIKGIQLGKEEVKLSLFADDMIVYLENPIVSAQNLLK | |
| | LISNFSKVSGYKINVQKSQAFLYNNNRQTESQIMGELPFTIASKRIKY | |
| | LGIQLTRDVKDLFKENYKPLLKEIKEDINKWKNIPCSWVGRINIVKMA | |
| | ILPKVIYRFNAIPIKLPMTFFTELEKTTLKFIWNQKRARIAKSILSQK | |
| | NKAGGITLPDFKLYYKATVTKTAWYWYQNRDIDQWNRTEPSEIMPHIY | |
| | NYLIFDKPEKNKQWGKDSLLNKWCWENWLAICRKLKLDPFLTPYTKIN | |
| | SRWIKDLNVKPKTIKTLEENLGITIQDIGVGKDFMSKTPKAMATKDKI | |
| | DKWDLIKLKSFCTAKETTIRVNRQPTTWEKIFATYSSDKGLISRIYNE | |
| | LKQIYKKKTNNPIKKWAKDMNRHFSKEDIYAAKKHMKKCSSSLAIREM | |
| | QIKTTMRYHLTPVRMAIIKKSGNNRCWRGCGEIGTLVHCWWDCKLVQP | |
| | LWKSVWRFLRDLELEIPFDPAIPLLGIYPKDYKSCCYKDTCTRMFIAA | |
| | LFTIAKTWNQPNCPTMIDWIKKMWHIYTMEYYAAIKNDEFISFVGTWM | |
| | KLETIILSKLSQEQKTKHRIFSLIGGN | |
| Ty1 | AVKAVKSIKPIRTTLRYDEAITYNKDIKEKEKYIEAYHKEVNQLLKMK | 471 |
| LTR | TWDTDEYYDRKEIDPKRVINSMFIFNKKRDGTHKARFVARGDIQHPDT | |
| Retrotransposon | YDSGMQSNTVHHYALMTSLSLALDNNYYITQLDISSAYLYADIKEELY | |
| AAA6693 | IRPPPHLGMNDKLIRLKKSLYGLKQSGANWYETIKSYLIQQCGMEEVR | |
| | GWSCVFKNSQVTICLFVDDMVLFSKNLNSNKRIIEKLKMQYDTKIINL | |
| | GESDEEIQYDILGLEIKYQRGKYMKLGMENSLTEKIPKLNVPLNPKGR | |
| | KLSAPGQPGLYIDQDELEIDEDEYKEKVHEMQKLIGLASYVGYKFRED | |
| | LLYYINTLAQHILFPSRQVLDMTYELIQFMWDTRDKQLIWHKNKPTEP | |
| | DNKLVAISDASYGNQPYYKSQIGNIYLLNGKVIGGKSTKASLTCTSTT | |
| | EAEIHAISESVPLLNNLSYLIQELNKKPIIKGLLTDSRSTISIIKSTN | |
| | EEKFRNRFFGTKAMRLRDEVSGNNLYVYYIETKKNIADVMTKPLPIKT | |
| | FKLLTNKWIH | |
| Brt | MGKRHRNLIDQITTWENLLDAYRKTSHGKRRTWGYLEFKEYDLANLLA | 472 |
| Q775D8 | LQAELKAGNYERGPYREFLVYEPKPRLISALEFKDRLVQHALCNIVAP | |
| | IFEAGLLPYTYACRPDKGTHAGVCHVQAELRRTRATHFLKSDFSKFFP | |
| | SIDRAALYAMIDKKIHCAATRRLLRVVLPDEGVGIPIGSLTSQLFANV | |
| | YGGAVDRLLHDELKQRHWARYMDDIVVLGDDPEELRAVFYRLRDFASE | |
| | RLGLKISHWQVAPVSRGINFLGYRIWPTHKLLRKSSVKRAKRKVANFI | |
| | KHGEDESLQRFLASWSGHAQWADTHNLFTWMEEQYGIACH | |
| RT86 | MKSAEYLNTFRLRNLGLPVMNNLHDMSKATRISVETLRLLIYTADFRY | 473 |
| P23070 | RIYTVEKKGPEKRMRTIYQPSRELKALQGWVLRNILDKLSSSPFSIGF | |
| | EKHQSILNNATPHIGANFILNIDLEDFFPSLTANKVFGVFHSLGYNRL | |
| | ISSVLTKICCYKNLLPQGAPSSPKLANLICSKLDYRIQGYAGSRGLIY | |
| | TRYADDLTLSAQSMKKVVKARDFLFSIIPSEGLVINSKKTCISGPRSQ | |
| | RKVTGLVISQEKVGIGREKYKEIRAKIHHIFCGKSSEIEHVRGWLSFI | |
| | LSVDSKSHRRLITYISKLEKKYGKNPLNKAKT | |
| TERT | MPRAPRCRAVRSLLRSHYREVLPLATFVRRLGPQGWRLVQRGDPAAFR | 474 |
| O14746 | ALVAQCLVCVPWDARPPPAAPSFRQVSCLKELVARVLQRLCERGAKNV | |
| | LAFGFALLDGARGGPPEAFTTSVRSYLPNTVTDALRGSGAWGLLLRRV | |
| | GDDVLVHLLARCALFVLVAPSCAYQVCGPPLYQLGAATQARPPPHASG | |
| | PRRRLGCERAWNHSVREAGVPLGLPAPGARRRGGSASRSLPLPKRPRR | |
| | GAAPEPERTPVGQGSWAHPGRTRGPSDRGFCVVSPARPAEEATSLEGA | |
| | LSGTRHSHPSVGRQHHAGPPSTSRPPRPWDTPCPPVYAETKHFLYSSG | |
| | DKEQLRPSFLLSSLRPSLTGARRLVETIFLGSRPWMPGTPRRLPRLPQ | |
| | RYWQMRPLFLELLGNHAQCPYGVLLKTHCPLRAAVTPAAGVCAREKPQ | |
| | GSVAAPEEEDTDPRRLVQLLRQHSSPWQVYGFVRACLRRLVPPGLWGS | |
| | RHNERRFLRNTKKFISLGKHAKLSLQELTWKMSVRDCAWLRRSPGVGC | |
| | VPAAEHRLREEILAKFLHWLMSVYVVELLRSFFYVTETTFQKNRLFFY | |
| | RKSVWSKLQSIGIRQHLKRVQLRELSEAEVRQHREARPALLTSRLRFI | |
| | PKPDGLRPIVNMDYVVGARTFRREKRAERLTSRVKALFSVLNYERARR | |
| | PGLLGASVLGLDDIHRAWRTFVLRVRAQDPPPELYFVKVDVTGAYDTI | |
| | PQDRLTEVIASIIKPQNTYCVRRYAVVQKAAHGHVRKAFKSHVSTLTD | |
| | LQPYMRQFVAHLQETSPLRDAVVIEQSSSLNEASSGLFDVFLREMCHH | |
| | AVRIRGKSYVQCQGIPQGSILSTLLCSLCYGDMENKLFAGIRRDGLLL | |
| | RLVDDFLLVTPHLTHAKTFLRTLVRGVPEYGCVVNLRKTVVNFPVEDE | |
| | ALGGTAFVQMPAHGLFPWCGLLLDTRTLEVQSDYSSYARTSIRASLTF | |
| | NRGFKAGRNMRRKLFGVLRLKCHSLFLDLQVNSLQTVCTNIYKILLLQ | |
| | AYRFHACVLQLPFHQQVWKNPTFFLRVISDTASLCYSILKAKNAGMSL | |
| | GAKGAAGPLPSEAVQWLCHQAFLLKLTRHRVTYVPLLGSLRTAQTQLS | |
| | RKLPGTTLTALEAAANPALPSDFKTILD | |
| Mauriceville | MPNHRLPNCVSYLGENHELSWLHGMFGLLKRSNPQTGGILGWLNTGPN | 475 |
| Q36578 | GFVKYMMNLMGHARDKGDAKEYWRLGRSLMKNEAFQVQAFNHVCKHWY | |
| | LDYKPHKIAKLLKEVREMVEIQPVCIDYKRVYIPKANGKQRPLGVPTV | |
| | PWRVYLHMWNVLLVWYRIPEQDNQHAYFPKRGVFTAWRALWPKLDSQN | |
| | IYEFDLKNFFPSVDLAYLKDKLMESGIPQDISEYLTVLNRSLVVLTSE | |
| | DKIPEPHRDVIFNSDGTPNPNLPKDVQGRILKDPDFVEILRRRGFTDI | |
| | ATNGVPQGASTSCGLATYNVKELFKRYDELIMYADDGILCRQDPSTPD | |
| | FSVEEAGVVQEPAKSGWIKQNGEFKKSVKFLGLEFIPANIPPLGEGEV | |
| | KDYPRLRGATRNGSKMELSTELQFLCYLSYKLRIKVLRDLYIQVLGYL | |
| | PSVPLLRYRSLAEAINELSPKRITIGQFITSSFEEFTAWSPLKRMGFF | |
| | FSSPAGPTILSSIFNNSTNLQEPSDSRLLYRKGSWVNIRFAAYLYSKL | |
| | SEEKHGLVPKFLEKLREINFALDKVDVTEIDSKLSRLMKFSVSAAYDE | |
| | VGTLALKSLFKFRNSERESIKASFKQLRENGKIAEFSEARRLWFEILK | |
| | LIRLDLFNASSLACDDLLSHLQDRRSIKKWGSSDVLYLKSQRLMRINK | |
| | KQLQLDFEKKKNSLKKKLIKRRAKELRDTFKGKENKEA | |
| RTX | MILDTDYITEDGKPVIRIFKKENGEFKIEYDRTFEPYLYALLKDDSAI | 476 |
| QFN49000.1 | EEVKKITAERHGTVVTVKRVEKVQKKFLGRPVEVWKLYFTHPQDVPAI | |
| | MDKIREHPAVIDIYEYDIPFAIRYLIDKGLVPMEGDEELKLLAFDIET | |
| | LYHEGEEFAEGPILMISYADEEGARVITWKNVDLPYVDVVSTEREMIK | |
| | RFLRVVKEKDPDVLITYNGDNFDFAYLKKRCEKLGINFALGRDGSEPK | |
| | IQRMGDRFAVEVKGRIHFDLYPVIRRTINLPTYTLEAVYEAVFGQPKE | |
| | KVYAEEITTAWETGENLERVARYSMEDAKVTYELGKEFLPMEAQLSRL | |
| | IGQSLWDVSRSSTGNLVEWELLRKAYERNELAPNKPDEKELARRHQSH | |
| | EGGYIKEPERGLWENIVYLDERSLYPSIIITHNVSPDTLNREGCKEYD | |
| | VAPQVGHRFCKDFPGFIPSLLGDLLEERQKIKKRMKATIDPIERKLLD | |
| | YRQRAIKILANSLYGYYGYARARWYCKECAESVIAWGREYLTMTIKEI | |
| | EEKYGFKVIYSDTDGFFATIPGADAETVKKKAMEFLKYINAKLPGALE | |
| | LEYEGFYKRGLFVTKKKYAVIDEEGKITTRGLEIVRRDWSEIAKETQA | |
| | RVLEALLKDGDVEKAVRIVKEVTEKLSKYEVPPEKLVIHKQITRDLKD | |
| | YKATGPHVAVAKRLAARGVKIRPGTVISYIVLKGSGRIVDRAIPFDEF | |
| | DPTKHKYDAEYYIEKQVLPAVERILRAFGYRKEDLRYQKTRQVGLSAR | |
| | LKPKGTLEGSSHHHHHH | |

[0220] In some embodiments, the amino acid sequence of the reverse transcriptase (or the functional fragment, functional variant, or domain thereof) comprises or consists of an amino acid sequence at least 85%, 86%, 87%, 88%, 89%, 90%, 91%, 92%, 93%, 94%, 95%, 96%, 97%, 98%, 99%, or 100% identical to the amino acid sequence of a polypeptide set forth in Table 2.

[0221] In some embodiments, the amino acid sequence of the reverse transcriptase (or the functional fragment, functional variant, or domain thereof) comprises or consists of the amino acid sequence of a polypeptide set forth in Table 2, and further comprises 1 or more but less than 15% (e.g., less than 12%, less than 10%, less than 8%), amino acid variations (e.g., substitutions, additions, deletions, etc.). In some embodiments, the amino acid sequence of the reverse transcriptase (or the functional fragment, functional variant, or domain thereof) comprises or consists of the amino acid sequence of a polypeptide set forth in Table 2, and further comprises or consists of at least about 1, 2, 3, 4, 5, 6, 7, 8, 9, or 10 amino acid variations (e.g., substitutions, additions, deletions, etc.). In some embodiments, the amino acid sequence of the reverse transcriptase ((or the functional fragment, functional variant, or domain thereof) comprises or consists of the amino acid sequence of a polypeptide set forth in Table 2, and further comprises or consists of about 1, 2, 3, 4, 5, 6, 7, 8, 9, or 10 amino acid variations (e.g., substitutions, additions, deletions, etc.). In some embodiments, the amino acid sequence of the reverse transcriptase (or the functional fragment, functional variant, or domain thereof) comprises or consists of the amino acid sequence of a polypeptide set forth in Table 2, and further comprises or consists of no more than about 1, 2, 3, 4, 5, 6, 7, 8, 9, or 10 amino acid variations (e.g., substitutions, additions, deletions, etc.).

[0222] In some embodiments, the amino acid sequence of the reverse transcriptase (or the functional fragment, functional variant, or domain thereof) comprises or consists of the amino acid sequence of a polypeptide set forth in Table 2, and further comprises 1 or more but less than 15% (e.g., less than 12%, less than 10%, less than 8%), amino acid substitutions. In some embodiments, the amino acid sequence of the reverse transcriptase (or the functional fragment, functional variant, or domain thereof) comprises or consists of the amino acid sequence of a polypeptide set forth in Table 2, and further comprises or consists of at least about 1, 2, 3, 4, 5, 6, 7, 8, 9, or 10 amino acid substitutions. In some embodiments, the amino acid sequence of the reverse transcriptase (or the functional fragment or variant thereof) comprises or consists of the amino acid sequence of a polypeptide set forth in Table 2, and further comprises or consists of about 1, 2, 3, 4, 5, 6, 7, 8, 9, or 10 amino acid substitutions. In some embodiments, the amino acid sequence of the reverse transcriptase (or the functional fragment, functional variant, or domain thereof) comprises or consists of the amino acid sequence of a polypeptide set forth in Table 2, and further comprises or consists of no more than about 1, 2, 3, 4, 5, 6, 7, 8, 9, or 10 amino acid substitutions.

[0223] In some embodiments, the amino acid sequence of reverse transcriptase (or the functional fragment or variant thereof) comprises or consists of an amino acid sequence at least 85%, 86%, 87%, 88%, 89%, 90%, 91%, 92%, 93%, 94%, 95%, 96%, 97%, 98%, 99%, or 100% identical to the amino acid sequence of any one of SEQ ID NOS: 324-476.

[0224] In some embodiments, the amino acid sequence of the reverse transcriptase (or the functional fragment, functional variant, or domain thereof) comprises or consists of the amino acid sequence of any one of SEQ ID NOS: 324-476, and further comprises 1 or more but less than 15% (less than 12%, less than 10%, less than 8%), amino acid variations (e.g., substitutions, additions, deletions, etc.). In some embodiments, the amino acid sequence of the reverse transcriptase (or the functional fragment, functional variant, or domain thereof) comprises or consists of the amino acid sequence of any one of SEQ ID NOS: 324-476, and further comprises or consists of at least about 1, 2, 3, 4, 5, 6, 7, 8, 9, or 10 amino acid variations (e.g., substitutions, additions, deletions, etc.). In some embodiments, the amino acid sequence of the reverse transcriptase (or the functional fragment or variant thereof) comprises or consists of the amino acid sequence of any one of SEQ ID NOS: 324-476, and further comprises or consists of about 1, 2, 3, 4, 5, 6, 7, 8, 9, or 10 amino acid variations (e.g., substitutions, additions, deletions, etc.). In some embodiments, the amino acid sequence of the reverse transcriptase (or the functional fragment, functional variant, or domain thereof) comprises or consists of the amino acid sequence of any one of SEQ ID NOS: 324-476, and further comprises or consists of no more than about 1, 2, 3, 4, 5, 6, 7, 8, 9, or 10 amino acid variations (e.g., substitutions, additions, deletions, etc.).

[0225] In some embodiments, the amino acid sequence of the reverse transcriptase (or the functional fragment, functional variant, or domain thereof) comprises or consists of the amino acid sequence of any one of SEQ ID NOS: 324-476, and further comprises 1 or more but less than 15% (e.g., less than 12%, less than 10%, less than 8%), amino acid substitutions. In some embodiments, the amino acid sequence of the reverse transcriptase (or the functional fragment, functional variant, or domain thereof) comprises or consists of the amino acid sequence of any one of SEQ ID NOS: 324-476, and further comprises or consists of at least about 1, 2, 3, 4, 5, 6, 7, 8, 9, or 10 amino acid substitutions. In some embodiments, the amino acid sequence of the reverse transcriptase (or the functional fragment, functional variant, or domain thereof) comprises or consists of the amino acid sequence of any one of SEQ ID NOS: 324-476, and further comprises or consists of about 1, 2, 3, 4, 5, 6, 7, 8, 9, or 10 amino acid substitutions. In some embodiments, the amino acid sequence of the reverse transcriptase (or the functional fragment, functional variant, or domain thereof) comprises or consists of the amino acid sequence of any one of SEQ ID NOS: 324-476, and further comprises or consists of no more than about 1, 2, 3, 4, 5, 6, 7, 8, 9, or 10 amino acid substitutions.

[0226] In some embodiments, the RT is a RT (or a functional fragment, functional variant, or domain thereof) described in WO2021178720 (see, e.g., Table 1, Table 2, Table 3, Table 30, Table 41, Table 44) and WO2023039424 (see, e.g., Table 6), the entire contents of which are incorporated herein by reference for all purposes.

[0227] In some embodiments, the amino acid sequence of the reverse transcriptase (or the functional fragment, functional variant, or domain thereof) comprises or consists of an amino acid sequence at least 85%, 86%, 87%, 88%, 89%, 90%, 91%, 92%, 93%, 94%, 95%, 96%, 97%, 98%, 99%, or 100% identical to the amino acid sequence of a polypeptide described in WO2021178720 (see, e.g., Table 1, Table 2, Table 3, Table 30, Table 41, Table 44) and WO2023039424 (see, e.g., Table 6).

[0228] In some embodiments, the amino acid sequence of the reverse transcriptase (or the functional fragment, functional variant, or domain thereof) comprises or consists of the amino acid sequence of a polypeptide described in WO2021178720 (see, e.g., Table 1, Table 2, Table 3, Table 30, Table 41, Table 44), and further comprises 1 or more but less than 15% (e.g., less than 12%, less than 10%, less than 8%), amino acid variations (e.g., substitutions, additions, deletions, etc.). In some embodiments, the amino acid sequence of the reverse transcriptase (or the functional fragment, functional variant, or domain thereof) comprises or consists of the amino acid sequence of a polypeptide described in WO2021178720 (see, e.g., Table 1, Table 2, Table 3, Table 30, Table 41, Table 44), and further comprises or consists of at least about 1, 2, 3, 4, 5, 6, 7, 8, 9, or 10 amino acid variations (e.g., substitutions, additions, deletions, etc.). In some embodiments, the amino acid sequence of the reverse transcriptase (or the functional fragment, functional variant, or domain thereof) comprises or consists of the amino acid sequence of a polypeptide described in WO2021178720 (see, e.g., Table 1, Table 2, Table 3, Table 30, Table 41, Table 44), and further comprises or consists of about 1, 2, 3, 4, 5, 6, 7, 8, 9, or 10 amino acid variations (e.g., substitutions, additions, deletions, etc.). In some embodiments, the amino acid sequence of the reverse transcriptase (or the functional fragment, functional variant, or domain thereof) comprises or consists of the amino acid sequence of a polypeptide described in WO2021178720 (see, e.g., Table 1, Table 2, Table 3, Table 30, Table 41, Table 44), and further comprises or consists of no more than about 1, 2, 3, 4, 5, 6, 7, 8, 9, or 10 amino acid variations (e.g., substitutions, additions, deletions, etc.).

[0229] In some embodiments, the amino acid sequence of the reverse transcriptase (or the functional fragment, functional variant, or domain thereof) comprises or consists of the amino acid sequence of a polypeptide described in WO2021178720 (see, e.g., Table 1, Table 2, Table 3, Table 30, Table 41, Table 44), and further comprises 1 or more but less than 15% (e.g., less than 12%, less than 10%, less than 8%), amino acid substitutions. In some embodiments, the amino acid sequence of the reverse transcriptase (or the functional fragment, functional variant, or domain thereof) comprises or consists of the amino acid sequence of a polypeptide described in WO2021178720 (see, e.g., Table 1, Table 2, Table 3, Table 30, Table 41, Table 44), and further comprises or consists of at least about 1, 2, 3, 4, 5, 6, 7, 8, 9, or 10 amino acid substitutions. In some embodiments, the amino acid sequence of the reverse transcriptase (or the functional fragment, functional variant, or domain thereof) comprises or consists of the amino acid sequence of a polypeptide described in WO2021178720 (see, e.g., Table 1, Table 2, Table 3, Table 30, Table 41, Table 44), and further comprises or consists of about 1, 2, 3, 4, 5, 6, 7, 8, 9, or 10 amino acid substitutions. In some embodiments, the amino acid sequence of the reverse transcriptase (or the functional fragment, functional variant, or domain thereof) comprises or consists of the amino acid sequence of a polypeptide described in WO2021178720 (see, e.g., Table 1, Table 2, Table 3, Table 30, Table 41, Table 44), and further comprises or consists of no more than about 1, 2, 3, 4, 5, 6, 7, 8, 9, or 10 amino acid substitutions.

### 4.3.1.2 Nucleobase Editors

[0230] In some embodiments, the heterologous protein (or a functional fragment, functional variant, or domain thereof) exhibits nucleobase editing activity. In some embodiments, the heterologous protein (or a functional fragment, functional variant, or domain thereof) comprises or consists of the nucleobase editing domain (e.g., a domain capable of modifying a nucleobase (e.g., A, T, C, G, or U) within a nucleic acid molecule (e.g., DNA)) of a nucleobase editor (e.g., a nucleobase editor described herein).

[0231] In some embodiments, the heterologous protein is a nucleobase editor (or a functional fragment, functional variant, or domain thereof). In some embodiments, the nucleobase editor (or the functional fragment, functional variant, or domain thereof) comprises or consists of the nucleobase editing domain (e.g., a domain capable of modifying a base (e.g., A, T, C, G, or U) within a nucleic acid molecule (e.g., DNA)) of a nucleobase editor (e.g., a nucleobase editor described herein). In some embodiments, the nucleobase editor is a deaminase (or a functional fragment, functional variant, or domain thereof). In some embodiments, the deaminase is a cytidine deaminase (or a functional fragment, functional variant, or domain thereof). In some embodiments, the deaminase is an adenosine deaminase (or a functional fragment, functional variant, or domain thereof).

[0232] In some embodiments, the nucleobase editor comprises a naturally occurring nucleobase editor (e.g., deaminase) (or the functional fragment, functional variant, or domain thereof). In some embodiments, the nucleobase editor (e.g., deaminase) comprises a functional fragment of a naturally occurring nucleobase editor. In some embodiments, the nucleobase editor (e.g., deaminase) comprises a functional variant of a naturally occurring nucleobase editor. In some embodiments, the nucleobase editor (e.g., deaminase) comprises a functional fragment and variant of a naturally occurring nucleobase editor. In some embodiments, the nucleobase editor (e.g., deaminase) comprises one or more domain of a naturally occurring nucleobase editor. In some embodiments, the nucleobase editor (e.g., deaminase) comprises a functional fragment of one or more domain of a naturally occurring nucleobase editor. In some embodiments, the nucleobase editor (e.g., deaminase) comprises a functional variant of one or more domain of a naturally occurring nucleobase editor. In some embodiments, the nucleobase editor (e.g., deaminase) comprises a functional fragment and functional variant of one or more domain of a naturally occurring nucleobase editor.

[0233] In some embodiments, the nucleobase editor (e.g., deaminase) is a eukaryotic nucleobase editor (or the functional fragment, functional variant, or domain thereof). In some embodiments, the nucleobase editor (e.g., deaminase) is a prokaryotic nucleobase editor (or the functional fragment, functional variant, or domain thereof). In some embodiments, the nucleobase editor (e.g., deaminase) is a viral nucleobase editor (or the functional fragment, functional variant, or domain thereof). In some embodiments, the nucleobase editor (e.g., deaminase) is a bacterial nucleobase editor (or the functional fragment, functional variant, or domain thereof).

[0234] Naturally occurring nucleobase editors, e.g., deaminases (e.g., cytidine deaminases, adenosine deaminases), are known in the art and described herein (see, e.g., Table 3).

[0235] For example, naturally occurring cytidine deaminases include, but are not limited to, the apolipoprotein B mRNA editing complex (APOBEC) family deaminases and cytidine deaminase 1 (CDA1). The APOBEC family includes, for example, but are not limited to, APOBEC1, APOBEC2, APOBEC3A, APOBEC3B, APOBEC3C, APOBEC3D (now typically referred to as “APOBEC3E”), APOBEC3F, APOBEC3G, APOBEC3H, APOBEC4, and activation-induced (cytidine or cytosine) deaminase (AID). The cytidine deaminase can be derived from any suitable organism, including, e.g., human, chimpanzee, gorilla, monkey, cow, dog, rat, or mouse. Exemplary cytidine deaminases are described in WO2022/204268, the entire contents of which is incorporated herein by reference for all purposes.

[0236] Naturally occurring adenosine deaminases include, for example, but are not limited to, adenosine deaminase ADAR (e.g., ADAR1, ADAR2), adenosine deaminase ADAT, TadA (e.g., from Escherichia coli (ecTadA)). TadA and variants thereof are known in the art and described in, e.g., WO2018/027078 and WO2022/204268, the entire contents of each of which are incorporated herein by reference for all purposes. The adenosine deaminase can be derived from any suitable organism (e.g., Escherichia coli). In some embodiments, the adenosine deaminase is derived from Escherichia coli, Staphylococcus aureus, Salmonella typhi, Shewanella putrefaciens, Haemophilus influenzae, Caulobacter crescentus, or Bacillus subtilis. In some embodiments, the adenosine deaminase is derived from Escherichia coli. In some embodiments, the adenosine deaminase is an ecTadA. In some embodiments, the ecTadA is a variant as described in WO2018/027078 or WO2022/204268, the entire contents of each of which are incorporated herein by reference for all purposes.

[0237] In some embodiments, the adenosine deaminase is a variant TadA deaminase. In some embodiments, the variant TadA deaminase is one described in WO2022/204268 (see, e.g., Table 3, pages 91-93), the entire contents of which are incorporated herein by reference for all purposes. In some embodiments, the TadA is provided as a monomer or dimer (e.g., a heterodimer of wild-type E. coli TadA and an engineered TadA variant). In some embodiments, the adenosine deaminase is an eighth generation TadA* 8 variant as described in WO2022/204268 (see, e.g., Table 4). In some embodiments, the adenosine deaminase is an eighth generation TadA* 8 variant as shown in WO2022/204268 (see, e.g., pages 91-92), the entire contents of which are incorporated herein by reference for all purposes.

[0238] Exemplary nucleobase editors are described in, e.g., WO2022/204268, WO2018/027078, WO2017/070632, Komor, A. C., et al., “Programmable editing of a target base in genomic DNA without double-stranded DNA cleavage” Nature 533, 420-424 (2016); Gaudelli, N. M., et al., “Programmable base editing of A·T to G»C in genomic DNA without DNA cleavage” Nature 551, 464-471 (2017); Komor, A. C., et al., “Improved base excision repair inhibition and bacteriophage Mu Gam protein yields C:G-to-T:A base editors with higher efficiency and product purity” Science Advances 3:eaao4774 (2017), and Rees, H. A., et al., “Base editing: precision chemistry on the genome and transcriptome of living cells.” Nat Rev Genet. 2018 December; 19(12):770-788. doi: 10.1038/s41576-018-0059-1, the entire contents of each of which are hereby incorporated herein by reference for all purposes.

[0239] The amino acid sequence of exemplary nucleobase editors is provided in Table 3.

TABLE 3
Amino Acid Sequence of Exemplary Nucleobase Editors.

| | | SEQ |
|---|---|---|
| Description | Amino Acid Sequence | ID NO |
| Petromyzon | MTDAEYVRIHEKLDIYTFKKQFFNNKKSVSHRCYVLFELKRRGERRACFW | 477 |
| marinus CDA1 | GYAVNKPQSGTERGIHAEIFSIRKVEEYLRDNPGQFTINWYSSWSPCADC | |
| | AEKILEWYNQELRGNGHTLKIWACKLYYEKNARNQIGLWNLRDNGVGLNV | |
| | MVSEHYQCCRKIFIQSSHNQLNENRWLEKTLKRAEKRRSELSIMIQVKIL | |
| | HTTKSPAV | |
| Human AID | MDSLLMNRRKFLYQFKNVRWAKGRRETYLCYVVKRRDSATSFSLDFGYLR | 478 |
| | NKNGCHVELLFLRYISDWDLDPGRCYRVTWFTSWSPCYDCARHVADFLRG | |
| | NPNLSLRIFTARLYFCEDRKAEPEGLRRLHRAGVQIAIMTFKDYFYCWNT | |
| | FVENHERTFKAWEGLHENSVRLSRQLRRILLPLYEVDDLRDAFRTLGL | |
| Murine AID | MDSLLMKQKKFLYHFKNVRWAKGRHETYLCYVVKRRDSATSCSLDFGHLR | 479 |
| | NKSGCHVELLFLRYISDWDLDPGRCYRVTWFTSWSPCYDCARHVAEFLRW | |
| | NPNLSLRIFTARLYFCEDRKAEPEGLRRLHRAGVQIGIMTFKDYFYCWNT | |
| | FVENRERTFKAWEGLHENSVRLTRQLRRILLPLYEVDDLRDAFRMLGF | |
| Canine AID | MDSLLMKQRKFLYHFKNVRWAKGRHETYLCYVVKRRDSATSFSLDFGHLR | 480 |
| | NKSGCHVELLFLRYISDWDLDPGRCYRVTWFTSWSPCYDCARHVADFLRG | |
| | YPNLSLRIFAARLYFCEDRKAEPEGLRRLHRAGVQIAIMTFKDYFYCWNT | |
| | FVENREKTFKAWEGLHENSVRLSRQLRRILLPLYEVDDLRDAFRTLGL | |
| Bovine AID | MDSLLKKQRQFLYQFKNVRWAKGRHETYLCYVVKRRDSPTSFSLDFGHLR | 481 |
| | NKAGCHVELLFLRYISDWDLDPGRCYRVTWFTSWSPCYDCARHVADFLRG | |
| | YPNLSLRIFTARLYFCDKERKAEPEGLRRLHRAGVQIAIMTFKDYFYCWN | |
| | TFVENHERTFKAWEGLHENSVRLSRQLRRILLPLYEVDDLRDAFRTLGL | |
| Rat AID | MAVGSKPKAALVGPHWERERIWCFLCSTGLGTQQTGQTSRWLRPAATQDP | 482 |
| | VSPPRSLLMKQRKFLYHFKNVRWAKGRHETYLCYVVKRRDSATSFSLDFG | |
| | YLRNKSGCHVELLFLRYISDWDLDPGRCYRVTWFTSWSPCYDCARHVADF | |
| | LRGNPNLSLRIFTARLTGWGALPAGLMSPARPSDYFYCWNTEVENHERTE | |
| | KAWEGLHENSVRLSRRLRRILLPLYEVDDLRDAFRTLGL | |
| Canis lupus | MDSLLMKQRKFLYHFKNVRWAKGRHETYLCYVVKRRDSATSFSLDFGHLR | 483 |
| familiaris AID | NKSGCHVELLFLRYISDWDLDPGRCYRVTWFTSWSPCYDCARHVADFLRG | |
| | YPNLSLRIFAARLYFCEDRKAEPEGLRRLHRAGVQIAIMTFKDYFYCWNT | |
| | FVENREKTFKAWEGLHENSVRLSRQLRRILLPLYEVDDLRDAFRTLGL | |
| Bos taurus AID | MDSLLKKQRQFLYQFKNVRWAKGRHETYLCYVVKRRDSPTSFSLDFGHLR | 484 |
| | NKAGCHVELLFLRYISDWDLDPGRCYRVTWFTSWSPCYDCARHVADFLRG | |
| | YPNLSLRIFTARLYFCDKERKAEPEGLRRLHRAGVQIAIMTFKDYFYCWN | |
| | TFVENHERTFKAWEGLHENSVRLSRQLRRILLPLYEVDDLRDAFRTLGL | |
| Mus musculus | MDSLLMNRRKFLYQFKNVRWAKGRRETYLCYVVKRRDSATSFSLDFGYLR | 485 |
| AID | NKNGCHVELLFLRYISDWDLDPGRCYRVTWFTSWSPCYDCARHVADFLRG | |
| | NPNLSLRIFTARLYFCEDRKAEPEGLRRLHRAGVQIAIMTFKDYFYCWNT | |
| | FVENHERTFKAWEGLHENSVRLSRQLRRILLPLYEVDDLRDAFRTLGL | |
| Rattus | MSSETGPVAVDPTLRRRIEPHEFEVFFDPRELRKETCLLYEINWGGRHSI | 486 |
| norvegicus | WRHTSQNTNKHVEVNFIEKFTTERYFCPNTRCSITWFLSWSPCGECSRAI | |
| APOBEC-1 | TEFLSRYPHVTLFIYIARLYHHADPRNRQGLRDLISSGVTIQIMTEQESG | |
| | YCWRNFVNYSPSNEAHWPRYPHLWVRLYVLELYCIILGLPPCLNILRRKQ | |
| | PQLTFFTIALQSCHYQRLPPHILWATGLK | |
| Mesocricetus | MSSETGPVVVDPTLRRRIEPHEFDAFFDQGELRKETCLLYEIRWGGRHNI | 487 |
| auratus | WRHTGQNTSRHVEINFIEKFTSERYFYPSTRCSIVWFLSWSPCGECSKAI | |
| APOBEC-1 | TEFLSGHPNVTLFIYAARLYHHTDQRNRQGLRDLISRGVTIRIMTEQEYC | |
| | YCWRNFVNYPPSNEVYWPRYPNLWMRLYALELYCIHLGLPPCLKIKRRHQ | |
| | YPLTFFRLNLQSCHYQRIPPHILWATGFI | |
| Pongo | MTSEKGPSTGDPTLRRRIESWEFDVFYDPRELRKETCLLYEIKWGMSRKI | 488 |
| pygmaeus | WRSSGKNTINHVEVNFIKKFTSERRFHSSISCSITWFLSWSPCWECSQAI | |
| APOBEC-1 | REFLSQHPGVTLVIYVARLFWHMDQRNRQGLRDLVNSGVTIQIMRASEYY | |
| | HCWRNFVNYPPGDEAHWPQYPPLWMMLYALELHCIILSLPPCLKISRRWQ | |
| | NHLAFFRLHLQNCHYQTIPPHILLATGLIHPSVTWR | |
| Oryctolagus | MASEKGPSNKDYTLRRRIEPWEFEVFFDPQELRKEACLLYEIKWGASSKT | 489 |
| cuniculus | WRSSGKNTTNHVEVNFLEKLTSEGRLGPSTCCSITWFLSWSPCWECSMAI | |
| APOBECI | REFLSQHPGVTLIIFVARLFQHMDRRNRQGLKDLVTSGVTVRVMSVSEYC | |
| | YCWENFVNYPPGKAAQWPRYPPRWMLMYALELYCIILGLPPCLKISRRHQ | |
| | KQLTFFSLTPQYCHYKMIPPYILLATGLLQPSVPWR | |
| Monodelphis | MNSKTGPSVGDATLRRRIKPWEFVAFFNPQELRKETCLLYEIKWGNQNIW | 490 |
| domestica | RHSNQNTSQHAEINFMEKFTAERHFNSSVRCSITWFLSWSPCWECSKAIR | |
| APOBEC-1 | KFLDHYPNVTLAIFISRLYWHMDQQHRQGLKELVHSGVTIQIMSYSEYHY | |
| | CWRNFVDYPQGEEDYWPKYPYLWIMLYVLELHCIILGLPPCLKISGSHSN | |
| | QLALFSLDLQDCHYQKIPYNVLVATGLVQPFVTWR | |
| Pongo | MAQKEEAAAATEAASQNGEDLENLDDPEKLKELIELPPFEIVTGERLPAN | 491 |
| pygmaeus | FFKFQFRNVEYSSGRNKTFLCYVVEAQGKGGQVQASRGYLEDEHAAAHAE | |
| APOBEC-2 | EAFFNTILPAFDPALRYNVTWYVSSSPCAACADRIIKTLSKTKNLRLLIL | |
| | VGRLFMWEELEIQDALKKLKEAGCKLRIMKPQDFEYVWQNFVEQEEGESK | |
| | AFQPWEDIQENFLYYEEKLADILK | |
| Bos taurus | MAQKEEAAAAAEPASQNGEEVENLEDPEKLKELIELPPFEIVTGERLPAH | 492 |
| APOBEC-2 | YFKFQFRNVEYSSGRNKTFLCYVVEAQSKGGQVQASRGYLEDEHATNHAE | |
| | EAFFNSIMPTFDPALRYMVTWYVSSSPCAACADRIVKTLNKTKNLRLLIL | |
| | VGRLFMWEEPEIQAALRKLKEAGCRLRIMKPQDFEYIWQNFVEQEEGESK | |
| | AFEPWEDIQENFLYYEEKLADILK | |
| Mus musculus | MQPQRLGPRAGMGPFCLGCSHRKCYSPIRNLISQETFKFHFKNLGYAKGR | 493 |
| mAPOBEC-3 | KDTFLCYEVTRKDCDSPVSLHHGVFKNKDNIHAEICFLYWFHDKVLKVLS | |
| | PREEFKITWYMSWSPCFECAEQIVRFLATHHNLSLDIFSSRLYNVQDPET | |
| | QQNLCRLVQEGAQVAAMDLYEFKKCWKKFVDNGGRRFRPWKRLLINFRYQ | |
| | DSKLQEILRPCYISVPSSSSSTLSNICLTKGLPETRFWVEGRRMDPLSEE | |
| | EFYSQFYNQRVKHLCYYHRMKPYLCYQLEQFNGQAPLKGCLLSEKGKQHA | |
| | EILFLDKIRSMELSQVTITCYLTWSPCPNCAWQLAAFKRDRPDLILHIYT | |
| | SRLYFHWKRPFQKGLCSLWQSGILVDVMDLPQFTDCWTNFVNPKRPFWPW | |
| | KGLEIISRRTQRRLRRIKESWGLQDLVNDFGNLQLGPPMS | |
| Mouse | MGPFCLGCSHRKCYSPIRNLISQETFKFHFKNLGYAKGRKDTFLCYEVTR | 494 |
| APOBEC-3 | KDCDSPVSLHHGVFKNKDNIHAEICFLYWFHDKVLKVLSPREEFKITWYM | |
| | SWSPCFECAEQIVRFLATHHNLSLDIFSSRLYNVQDPETQQNLCRLVQEG | |
| | AQVAAMDLYEFKKCWKKFVDNGGRRFRPWKRLLINFRYQDSKLQEILRPC | |
| | YIPVPSSSSSTLSNICLTKGLPETRFCVEGRRMDPLSEEEFYSQFYNQRV | |
| | KHLCYYHRMKPYLCYQLEQFNGQAPLKGCLLSEKGKQHAEILFLDKIRSM | |
| | ELSQVTITCYLTWSPCPNCAWQLAAFKRDRPDLILHIYTSRLYFHWKRPF | |
| | QKGLCSLWQSGILVDVMDLPQFTDCWTNFVNPKRPFWPWKGLEIISRRTQ | |
| | RRLRRIKESWGLQDLVNDFGNLQLGPPMS | |
| Rat | MGPFCLGCSHRKCYSPIRNLISQETFKFHFKNRLRYAIDRKDTFLCYEVT | 495 |
| APOBEC-3 | RKDCDSPVSLHHGVFKNKDNIHAEICFLYWFHDKVLKVLSPREEFKITWY | |
| | MSWSPCFECAEQVLRFLATHHNLSLDIFSSRLYNIRDPENQQNLCRLVQE | |
| | GAQVAAMDLYEFKKCWKKFVDNGGRRFRPWKKLLTNFRYQDSKLQEILRP | |
| | CYIPVPSSSSSTLSNICLTKGLPETRFCVERRRVHLLSEEEFYSQFYNQR | |
| | VKHLCYYHGVKPYLCYQLEQFNGQAPLKGCLLSEKGKQHAEILFLDKIRS | |
| | MELSQVIITCYLTWSPCPNCAWQLAAFKRDRPDLILHIYTSRLYFHWKRP | |
| | FQKGLCSLWQSGILVDVMDLPQFTDCWTNFVNPKRPFWPWKGLEIISRRT | |
| | QRRLHRIKESWGLQDLVNDFGNLQLGPPMS | |
| Human | MEASPASGPRHLMDPHIFTSNFNNGIGRHKTYLCYEVERLDNGTSVKMDQ | 496 |
| APOBEC-3A | HRGFLHNQAKNLLCGFYGRHAELRFLDLVPSLQLDPAQIYRVTWFISWSP | |
| | CFSWGCAGEVRAFLQENTHVRLRIFAARIYDYDPLYKEALQMLRDAGAQV | |
| | SIMTYDEFKHCWDTFVDHQGCPFQPWDGLDEHSQALSGRLRAILQNQGN | |
| Human | MKPHFRNTVERMYRDTFSYNFYNRPILSRRNTVWLCYEVKTKGPSRPRLD | 497 |
| APOBEC-3F | AKIFRGQVYSQPEHHAEMCFLSWFCGNQLPAYKCFQITWFVSWTPCPDCV | |
| | AKLAEFLAEHPNVTLTISAARLYYYWERDYRRALCRLSQAGARVKIMDDE | |
| | EFAYCWENFVYSEGQPFMPWYKFDDNYAFLHRTLKEILRNPMEAMYPHIF | |
| | YFHFKNLRKAYGRNESWLCFTMEVVKHHSPVSWKRGVFRNQVDPETHCHA | |
| | ERCFLSWFCDDILSPNTNYEVTWYTSWSPCPECAGEVAEFLARHSNVNLT | |
| | IFTARLYYFWDTDYQEGLRSLSQEGASVEIMGYKDFKYCWENFVYNDDEP | |
| | FKPWKGLKYNFLFLDSKLQEILE | |
| Rhesus | MVEPMDPRTFVSNFNNRPILSGLNTVWLCCEVKTKDPSGPPLDAKIFQGK | 498 |
| macaque | VYSKAKYHPEMRFLRWFHKWRQLHHDQEYKVTWYVSWSPCTRCANSVATF | |
| APOBEC-3G | LAKDPKVTLTIFVARLYYFWKPDYQQALRILCQKRGGPHATMKIMNYNEF | |
| | QDCWNKFVDGRGKPFKPRNNLPKHYTLLQATLGELLRHLMDPGIFTSNEN | |
| | NKPWVSGQHETYLCYKVERLHNDTWVPLNQHRGFLRNQAPNIHGFPKGRH | |
| | AELCFLDLIPFWKLDGQQYRVTCFTSWSPCFSCAQEMAKFISNNEHVSLC | |
| | IFAARIYDDQGRYQEGLRALHRDGAKIAMMNYSEFEYCWDTFVDRQGRPF | |
| | QPWDGLDEHSQALSGRLRAI | |
| Chimpanzee | MKPHFRNPVERMYQDTFSDNFYNRPILSHRNTVWLCYEVKTKGPSRPPLD | 499 |
| APOBEC-3G | AKIFRGQVYSKLKYHPEMRFFHWFSKWRKLHRDQEYEVTWYISWSPCTKC | |
| | TRDVATFLAEDPKVTLTIFVARLYYFWDPDYQEALRSLCQKRDGPRATMK | |
| | IMNYDEFQHCWSKFVYSQRELFEPWNNLPKYYILLHIMLGEILRHSMDPP | |
| | TFTSNFNNELWVRGRHETYLCYEVERLHNDTWVLLNQRRGFLCNQAPHKH | |
| | GFLEGRHAELCFLDVIPFWKLDLHQDYRVTCFTSWSPCFSCAQEMAKFIS | |
| | NNKHVSLCIFAARIYDDQGRCQEGLRTLAKAGAKISIMTYSEFKHCWDTF | |
| | VDHQGCPFQPWDGLEEHSQALSGRLRAILQNQGN | |
| Green monkey | MNPQIRNMVEQMEPDIFVYYFNNRPILSGRNTVWLCYEVKTKDPSGPPLD | 500 |
| APOBEC-3G | ANIFQGKLYPEAKDHPEMKFLHWFRKWRQLHRDQEYEVTWYVSWSPCTRC | |
| | ANSVATFLAEDPKVTLTIFVARLYYFWKPDYQQALRILCQERGGPHATMK | |
| | IMNYNEFQHCWNEFVDGQGKPFKPRKNLPKHYTLLHATLGELLRHVMDPG | |
| | TFTSNFNNKPWVSGQRETYLCYKVERSHNDTWVLLNQHRGFLRNQAPDRH | |
| | GFPKGRHAELCFLDLIPFWKLDDQQYRVTCFTSWSPCFSCAQKMAKFISN | |
| | NKHVSLCIFAARIYDDQGRCQEGLRTLHRDGAKIAVMNYSEFEYCWDTFV | |
| | DRQGRPFQPWDGLDEHSQALSGRLRAI | |
| Human | MKPHFRNTVERMYRDTFSYNFYNRPILSRRNTVWLCYEVKTKGPSRPPLD | 501 |
| APOBEC-3G | AKIFRGQVYSELKYHPEMRFFHWFSKWRKLHRDQEYEVTWYISWSPCTKC | |
| | TRDMATFLAEDPKVTLTIFVARLYYFWDPDYQEALRSLCQKRDGPRATMK | |
| | IMNYDEFQHCWSKFVYSQRELFEPWNNLPKYYILLHIMLGEILRHSMDPP | |
| | TFTFNFNNEPWVRGRHETYLCYEVERMHNDTWVLLNQRRGFLCNQAPHKH | |
| | GFLEGRHAELCFLDVIPFWKLDLDQDYRVTCFTSWSPCFSCAQEMAKFIS | |
| | KNKHVSLCIFTARIYDDQGRCQEGLRTLAEAGAKISIMTYSEFKHCWDTF | |
| | VDHQGCPFQPWDGLDEHSQDLSGRLRAILQNQEN | |
| Human | MKPHFRNTVERMYRDTFSYNFYNRPILSRRNTVWLCYEVKTKGPSRPRLD | 502 |
| APOBEC-3F | AKIFRGQVYSQPEHHAEMCFLSWFCGNQLPAYKCFQITWFVSWTPCPDCV | |
| | AKLAEFLAEHPNVTLTISAARLYYYWERDYRRALCRLSQAGARVKIMDDE | |
| | EFAYCWENFVYSEGQPFMPWYKFDDNYAFLHRILKEILRNPMEAMYPHIF | |
| | YFHFKNLRKAYGRNESWLCFTMEVVKHHSPVSWKRGVFRNQVDPETHCHA | |
| | ERCFLSWFCDDILSPNTNYEVTWYTSWSPCPECAGEVAEFLARHSNVNLT | |
| | IFTARLYYFWDTDYQEGLRSLSQEGASVEIMGYKDFKYCWENFVYNDDEP | |
| | FKPWKGLKYNFLFLDSKLQEILE | |
| Human | MNPQIRNPMERMYRDTFYDNFENEPILYGRSYTWLCYEVKIKRGRSNLLW | 503 |
| APOBEC-3B | DTGVFRGQVYFKPQYHAEMCFLSWFCGNQLPAYKCFQITWFVSWTPCPDC | |
| | VAKLAEFLSEHPNVTLTISAARLYYYWERDYRRALCRLSQAGARVTIMDY | |
| | EEFAYCWENFVYNEGQQFMPWYKFDENYAFLHRTLKEILRYLMDPDTFTF | |
| | NFNNDPLVLRRRQTYLCYEVERLDNGTWVLMDQHMGFLCNEAKNLLCGFY | |
| | GRHAELRFLDLVPSLQLDPAQIYRVTWFISWSPCFSWGCAGEVRAFLQEN | |
| | THVRLRIFAARIYDYDPLYKEALQMLRDAGAQVSIMTYDEFEYCWDTFVY | |
| | RQGCPFQPWDGLEEHSQALSGRLRAILQNQGN | |
| Rat | MQPQGLGPNAGMGPVCLGCSHRRPYSPIRNPLKKLYQQTFYFHFKNVRYA | 504 |
| APOBEC-3B | WGRKNNFLCYEVNGMDCALPVPLRQGVFRKQGHIHAELCFIYWFHDKVLR | |
| | VLSPMEEFKVTWYMSWSPCSKCAEQVARFLAAHRNLSLAIFSSRLYYYLR | |
| | NPNYQQKLCRLIQEGVHVAAMDLPEFKKCWNKFVDNDGQPFRPWMRLRIN | |
| | FSFYDCKLQEIFSRMNLLREDVFYLQFNNSHRVKPVQNRYYRRKSYLCYQ | |
| | LERANGQEPLKGYLLYKKGEQHVEILFLEKMRSMELSQVRITCYLTWSPC | |
| | PNCARQLAAFKKDHPDLILRIYTSRLYFWRKKFQKGLCTLWRSGIHVDVM | |
| | DLPQFADCWTNFVNPQRPFRPWNELEKNSWRIQRRLRRIKESWGL | |
| Bovine | MDGWEVAFRSGTVLKAGVLGVSMTEGWAGSGHPGQGACVWTPGTRNTMNL | 505 |
| APOBEC-3B | LREVLFKQQFGNQPRVPAPYYRRKTYLCYQLKQRNDLTLDRGCFRNKKQR | |
| | HAERFIDKINSLDLNPSQSYKIICYITWSPCPNCANELVNFITRNNHLKL | |
| | EIFASRLYFHWIKSFKMGLQDLQNAGISVAVMTHTEFEDCWEQFVDNQSR | |
| | PFQPWDKLEQYSASIRRRLQRILTAPI | |
| Chimpanzee | MNPQIRNPMEWMYQRTFYYNFENEPILYGRSYTWLCYEVKIRRGHSNLLW | 506 |
| APOBEC-3B | DTGVFRGQMYSQPEHHAEMCFLSWFCGNQLSAYKCFQITWFVSWTPCPDC | |
| | VAKLAKFLAEHPNVTLTISAARLYYYWERDYRRALCRLSQAGARVKIMDD | |
| | EEFAYCWENFVYNEGQPFMPWYKFDDNYAFLHRTLKEIIRHLMDPDTFTF | |
| | NFNNDPLVLRRHQTYLCYEVERLDNGTWVLMDQHMGFLCNEAKNLLCGFY | |
| | GRHAELRFLDLVPSLQLDPAQIYRVTWFISWSPCFSWGCAGQVRAFLQEN | |
| | THVRLRIFAARIYDYDPLYKEALQMLRDAGAQVSIMTYDEFEYCWDTFVY | |
| | RQGCPFQPWDGLEEHSQALSGRLRAILQVRASSLCMVPHRPPPPPQSPGP | |
| | CLPLCSEPPLGSLLPTGRPAPSLPFLLTASFSFPPPASLPPLPSLSLSPG | |
| | HLPVPSFHSLTSCSIQPPCSSRIRETEGWASVSKEGRDLG | |
| Human | MNPQIRNPMKAMYPGTFYFQFKNLWEANDRNETWLCFTVEGIKRRSVVSW | 507 |
| APOBEC-3C | KTGVFRNQVDSETHCHAERCFLSWFCDDILSPNTKYQVTWYTSWSPCPDC | |
| | AGEVAEFLARHSNVNLTIFTARLYYFQYPCYQEGLRSLSQEGVAVEIMDY | |
| | EDFKYCWENFVYNDNEPFKPWKGLKTNFRLLKRRLRESLQ | |
| Gorilla | MNPQIRNPMKAMYPGTFYFQFKNLWEANDRNETWLCFTVEGIKRRSVVSW | 508 |
| APOBEC-3C | KTGVFRNQVDSETHCHAERCFLSWECDDILSPNTNYQVTWYTSWSPCPEC | |
| | AGEVAEFLARHSNVNLTIFTARLYYFQDTDYQEGLRSLSQEGVAVKIMDY | |
| | KDFKYCWENFVYNDDEPFKPWKGLKYNFRFLKRRLQEILE | |
| Human | MEASPASGPRHLMDPHIFTSNFNNGIGRHKTYLCYEVERLDNGTSVKMDQ | 509 |
| APOBEC-3A | HRGFLHNQAKNLLCGFYGRHAELRFLDLVPSLQLDPAQIYRVTWFISWSP | |
| | CFSWGCAGEVRAFLQENTHVRLRIFAARIYDYDPLYKEALQMLRDAGAQV | |
| | SIMTYDEFKHCWDTFVDHQGCPFQPWDGLDEHSQALSGRLRAILQNQGN | |
| Rhesus | MDGSPASRPRHLMDPNTFTFNFNNDLSVRGRHQTYLCYEVERLDNGTWVP | 510 |
| macaque | MDERRGFLCNKAKNVPCGDYGCHVELRFLCEVPSWQLDPAQTYRVTWFIS | |
| APOBEC-3A | WSPCFRRGCAGQVRVFLQENKHVRLRIFAARIYDYDPLYQEALRTLRDAG | |
| | AQVSIMTYEEFKHCWDTFVDRQGRPFQPWDGLDEHSQALSGRLRAILQNQ | |
| | GN | |
| Bovine | MDEYTFTENFNNQGWPSKTYLCYEMERLDGDATIPLDEYKGFVRNKGLDQ | 511 |
| APOBEC-3A | PEKPCHAELYFLGKIHSWNLDRNQHYRLTCFISWSPCYDCAQKLTTFLKE | |
| | NHHISLHILASRIYTHNRFGCHQSGLCELQAAGARITIMTFEDFKHCWET | |
| | FVDHKGKPFQPWEGLNVKSQALCTELQAILKTQQN | |
| Human | MALLTAETFRLQFNNKRRLRRPYYPRKALLCYQLTPQNGSTPTRGYFENK | 512 |
| APOBEC-3H | KKCHAEICFINEIKSMGLDETQCYQVTCYLTWSPCSSCAWELVDFIKAHD | |
| | HLNLGIFASRLYYHWCKPQQKGLRLLCGSQVPVEVMGFPKFADCWENFVD | |
| | HEKPLSFNPYKMLEELDKNSRAIKRRLERIKIPGVRAQGRYMDILCDAEV | |
| Rhesus | MALLTAKTFSLQFNNKRRVNKPYYPRKALLCYQLTPQNGSTPTRGHLKNK | 513 |
| macaque | KKDHAEIRFINKIKSMGLDETQCYQVTCYLTWSPCPSCAGELVDFIKAHR | |
| APOBEC-3H | HLNLRIFASRLYYHWRPNYQEGLLLLCGSQVPVEVMGLPEFTDCWENFVD | |
| | HKEPPSFNPSEKLEELDKNSQAIKRRLERIKSRSVDVLENGLRSLQLGPV | |
| | TPSSSIRNSR | |
| Human | MNPQIRNPMERMYRDTFYDNFENEPILYGRSYTWLCYEVKIKRGRSNLLW | 514 |
| APOBEC-3D | DTGVFRGPVLPKRQSNHRQEVYFRFENHAEMCFLSWFCGNRLPANRRFQI | |
| | TWFVSWNPCLPCVVKVTKFLAEHPNVTLTISAARLYYYRDRDWRWVLLRL | |
| | HKAGARVKIMDYEDFAYCWENFVCNEGQPFMPWYKFDDNYASLHRTLKEI | |
| | LRNPMEAMYPHIFYFHFKNLLKACGRNESWLCFTMEVTKHHSAVFRKRGV | |
| | FRNQVDPETHCHAERCFLSWFCDDILSPNTNYEVTWYTSWSPCPECAGEV | |
| | AEFLARHSNVNLTIFTARLCYFWDTDYQEGLCSLSQEGASVKIMGYKDFV | |
| | SCWKNFVYSDDEPFKPWKGLQTNFRLLKRRLREILQ | |
| Human | MTSEKGPSTGDPTLRRRIEPWEFDVFYDPRELRKEACLLYEIKWGMSRKI | 515 |
| APOBEC-1 | WRSSGKNTINHVEVNFIKKFTSERDFHPSMSCSITWFLSWSPCWECSQAI | |
| | REFLSRHPGVTLVIYVARLFWHMDQQNRQGLRDLVNSGVTIQIMRASEYY | |
| | HCWRNFVNYPPGDEAHWPQYPPLWMMLYALELHCIILSLPPCLKISRRWQ | |
| | NHLTFFRLHLQNCHYQTIPPHILLATGLIHPSVAWR | |
| Mouse | MSSETGPVAVDPTLRRRIEPHEFEVFFDPRELRKETCLLYEINWGGRHSV | 516 |
| APOBEC-1 | WRHTSQNTSNHVEVNFLEKFTTERYFRPNTRCSITWFLSWSPCGECSRAI | |
| | TEFLSRHPYVTLFIYIARLYHHTDQRNRQGLRDLISSGVTIQIMTEQEYC | |
| | YCWRNFVNYPPSNEAYWPRYPHLWVKLYVLELYCIILGLPPCLKILRRKQ | |
| | PQLTFFTITLQTCHYQRIPPHLLWATGLK | |
| Rat | MSSETGPVAVDPTLRRRIEPHEFEVFFDPRELRKETCLLYEINWGGRHSI | 517 |
| APOBEC-1 | WRHTSQNTNKHVEVNFIEKFTTERYFCPNTRCSITWFLSWSPCGECSRAI | |
| | TEFLSRYPHVTLFIYIARLYHHADPRNRQGLRDLISSGVTIQIMTEQESG | |
| | YCWRNFVNYSPSNEAHWPRYPHLWVRLYVLELYCIILGLPPCLNILRRKQ | |
| | PQLTFFTIALQSCHYQRLPPHILWATGLK | |
| Human | MAQKEEAAVATEAASQNGEDLENLDDPEKLKELIELPPFEIVTGERLPAN | 518 |
| APOBEC-2 | FFKFQFRNVEYSSGRNKTFLCYVVEAQGKGGQVQASRGYLEDEHAAAHAE | |
| | EAFFNTILPAFDPALRYNVTWYVSSSPCAACADRIIKTLSKTKNLRLLIL | |
| | VGRLFMWEEPEIQAALKKLKEAGCKLRIMKPQDFEYVWQNFVEQEEGESK | |
| | AFQPWEDIQENFLYYEEKLADILK | |
| Mouse | MAQKEEAAEAAAPASQNGDDLENLEDPEKLKELIDLPPFEIVTGVRLPVN | 519 |
| APOBEC-2 | FFKFQFRNVEYSSGRNKTFLCYVVEVQSKGGQAQATQGYLEDEHAGAHAE | |
| | EAFFNTILPAFDPALKYNVTWYVSSSPCAACADRILKTLSKTKNLRLLIL | |
| | VSRLFMWEEPEVQAALKKLKEAGCKLRIMKPQDFEYIWQNFVEQEEGESK | |
| | AFEPWEDIQENFLYYEEKLADILK | |
| Rat | MAQKEEAAEAAAPASQNGDDLENLEDPEKLKELIDLPPFEIVTGVRLPVN | 520 |
| APOBEC-2 | FFKFQFRNVEYSSGRNKTFLCYVVEAQSKGGQVQATQGYLEDEHAGAHAE | |
| | EAFFNTILPAFDPALKYNVTWYVSSSPCAACADRILKTLSKTKNLRLLIL | |
| | VSRLFMWEEPEVQAALKKLKEAGCKLRIMKPQDFEYLWQNFVEQEEGESK | |
| | AFEPWEDIQENFLYYEEKLADILK | |
| Bovine | MAQKEEAAAAAEPASQNGEEVENLEDPEKLKELIELPPFEIVTGERLPAH | 521 |
| APOBEC-2 | YFKFQFRNVEYSSGRNKTFLCYVVEAQSKGGQVQASRGYLEDEHATNHAE | |
| | EAFFNSIMPTFDPALRYMVTWYVSSSPCAACADRIVKTLNKTKNLRLLIL | |
| | VGRLFMWEEPEIQAALRKLKEAGCRLRIMKPQDFEYIWQNFVEQEEGESK | |
| | AFEPWEDIQENFLYYEEKLADILK | |
| Petromyzon | MTDAEYVRIHEKLDIYTFKKQFFNNKKSVSHRCYVLFELKRRGERRACFW | 522 |
| marinus | GYAVNKPQSGTERGIHAEIFSIRKVEEYLRDNPGQFTINWYSSWSPCADC | |
| CDA1 | AEKILEWYNQELRGNGHTLKIWACKLYYEKNARNQIGLWNLRDNGVGLNV | |
| | MVSEHYQCCRKIFIQSSHNQLNENRWLEKTLKRAEKRRSELSFMIQVKIL | |
| | HTTKSPAV | |
| Human | MKPHFRNTVERMYRDTFSYNFYNRPILSRRNTVWLCYEVKTKGPSRPPLD | 523 |
| APOBEC3G | AKIFRGQVYSELKYHPEMRFFHWFSKWRKLHRDQEYEVTWYISWSPCTKC | |
| D316R D317R | TRDMATFLAEDPKVTLTIFVARLYYFWDPDYQEALRSLCQKRDGPRATMK | |
| | FNYDEFQHCWSKFVYSQRELFEPWNNLPKYYILLHFMLGEILRHSMDPPT | |
| | FTFNENNEPWVRGRHETYLCYEVERMHNDTWVLLNQRRGFLCNQAPHKHG | |
| | FLEGRHAELCFLDVIPFWKLDLDQDYRVTCFTSWSPCFSCAQEMAKFISK | |
| | KHVSLCIFTARIYRRQGRCQEGLRTLAEAGAKISFTYSEFKHCWDTFVDH | |
| | QGCPFQPWDGLDEHSQDLSGRLRAILQNQEN | |
| Human | MDPPTFTFNFNNEPWWGRHETYLCYEVERMHNDTWVLLNQRRGFLCNQAP | 524 |
| APOBEC3G | HKHGFLEGRHAELCFLDVIPFWKLDLDQDYRVTCFTSWSPCFSCAQEMAK | |
| chain A | FISKNKHVSLCIFTARIYDDQGRCQEGLRTLAEAGAKISFTYSEFKHCWD | |
| | TFVDHQGCPFQPWDGLDEHSQDLSGRLRAILQ | |
| Human | MDPPTFTFNFNNEPWVRGRHETYLCYEVERMHNDTWVLLNQRRGFLCNQA | 525 |
| APOBEC3G | PHKHGFLEGRHAELCFLDVIPFWKLDLDQDYRVTCFTSWSPCFSCAQEMA | |
| chain A D120R | KFISKNKHVSLCIFTARIYRRQGRCQEGLRTLAEAGAKISFMTYSEFKHC | |
| D121R | WDTFVDHQGCPFQPWDGLDEHSQDLSGRLRAILQ | |
| Human | MEPIYEEYLANHGTIVKPYYWLSFSLDCSNCPYHIRTGEEARVSLTEFCQ | 526 |
| APOBEC-4 | IFGFPYGTTFPQTKHLTFYELKTSSGSLVQKGHASSCTGNYIHPESMLFE | |
| | MNGYLDSAIYNNDSIRHIILYSNNSPCNEANHCCISKMYNFLITYPGITL | |
| | SIYFSQLYHTEMDFPASAWNREALRSLASLWPRVVLSPISGGIWHSVLHS | |
| | FISGVSGSHVFQPILTGRALADRHNAYEINAITGVKPYFTDVLLQTKRNP | |
| | NTKAQEALESYPLNNAFPGQFFQMPSGQLQPNLPPDLRAPVVFVLVPLRD | |
| | LPPMHMGQNPNKPRNIVRHLNMPQMSFQETKDLGRLPTGRSVEIVEITEQ | |
| | FASSKEADEKKKKKGKK | |
| Mus musculus | MDSLLMKQKKFLYHFKNVRWAKGRHETYLCYVVKRRDSATSCSLDFGHLR | 527 |
| APOBEC-4 | NKSGCHVELLFLRYISDWDLDPGRCYRVTWFTSWSPCYDCARHVAEFLRW | |
| | NPNLSLRIFTARLYFCEDRKAEPEGLRRLHRAGVQIGIMTFKDYFYCWNT | |
| | FVENRERTFKAWEGLHENSVRLTRQLRRILLPLYEVDDLRDAFRMLGF | |
| Rattus | MEPLYEEYLTHSGTIVKPYYWLSVSLNCTNCPYHIRTGEEARVPYTEFHQ | 528 |
| norvegicus | TFGFPWSTYPQTKHLTFYELRSSSGNLIQKGLASNCTGSHTHPESMLFER | |
| APOBEC-4 | DGYLDSLIFHDSNIRHIILYSNNSPCDEANHCCISKMYNFLMNYPEVTLS | |
| | VFFSQLYHTENQFPTSAWNREALRGLASLWPQVTLSAISGGIWQSILETF | |
| | VSGISEGLTAVRPFTAGRTLTDRYNAYEINCITEVKPYFTDALHSWQKEN | |
| | QDQKVWAASENQPLHNTTPAQWQPDMSQDCRTPAVFMLVPYRDLPPIHVN | |
| | PSPQKPRTVVRHLNTLQLSASKVKALRKSPSGRPVKKEEARKGSTRSQEA | |
| | NETNKSKWKKQTLFIKSNICHLLEREQKKIGILSSWSV | |
| Macaca | MEPTYEEYLANHGTIVKPYYWLSFSLDCSNCPYHIRTGEEARVSLTEFCQ | 529 |
| fascicularis | IFGFPYGTTYPQTKHLTFYELKTSSGSLVQKGHASSCTGNYIHPESMLFE | |
| APOBEC-4 | MNGYLDSAIYNNDSIRHIILYCNNSPCNEANHCCISKVYNFLITYPGITL | |
| | SIYFSQLYHTEMDFPASAWNREALRSLASLWPRVVLSPISGGIWHSVLHS | |
| | FVSGVSGSHVFQPILTGRALTDRYNAYEINAITGVKPFFTDVLLHTKRNP | |
| | NTKAQMALESYPLNNAFPGQSFQMTSGIPPDLRAPVVFVLLPLRDLPPMH | |
| | MGQDPNKPRNIIRHLNMPQMSFQETKDLERLPTRRSVETVEITERFASSK | |
| | QAEEKTKKKKGKK | |
| Petromyzon | MAGYECVRVSEKLDFDTFEFQFENLHYATERHRTYVIFDVKPQSAGGRSR | 530 |
| marinus | RLWGYIINNPNVCHAELILMSMIDRHLESNPGVYAMTWYMSWSPCANCSS | |
| CDA-1 | KLNPWLKNLLEEQGHTLTMHFSRIYDRDREGDHRGLRGLKHVSNSFRMGV | |
| | VGRAEVKECLAEYVEASRRTLTWLDTTESMAAKMRRKLFCILVRCAGMRE | |
| | SGIPLHLFTLQTPLLSGRVVWWRV | |
| Petromyzon | MELREVVDCALASCVRHEPLSRVAFLRCFAAPSQKPRGTVILFYVEGAGR | 531 |
| marinus | GVTGGHAVNYNKQGTSIHAEVLLLSAVRAALLRRRRCEDGEEATRGCTLH | |
| CDA-2 | CYSTYSPCRDCVEYIQEFGASTGVRVVIHCCRLYELDVNRRRSEAEGVLR | |
| | SLSRLGRDFRLMGPRDAIALLLGGRLANTADGESGASGNAWVTETNVVEP | |
| | LVDMTGFGDEDLHAQVQRNKQIREAYANYASAVSLMLGELHVDPDKFPFL | |
| | AEFLAQTSVEPSGTPRETRGRPRGASSRGPEIGRQRPADFERALGAYGLF | |
| | LHPRIVSREADREEIKRDLIVVMRKHNYQGP | |
| Petromyzon | MAGDENVRVSEKLDFDTFEFQFENLHYATERHRTYVIFDVKPQSAGGRSR | 532 |
| marinus | RLWGYIINNPNVCHAELILMSMIDRHLESNPGVYAMTWYMSWSPCANCSS | |
| CDA-5 | KLNPWLKNLLEEQGHTLMMHFSRIYDRDREGDHRGLRGLKHVSNSFRMGV | |
| | VGRAEVKECLAEYVEASRRTLTWLDTTESMAAKMRRKLFCILVRCAGMRE | |
| | SGMPLHLFT | |
| Saccharomyces | MVTGGMASKWDQKGMDIAYEEAALGYKEGGVPIGGCLINNKDGSVLGRGH | 533 |
| cerevisiae | NMRFQKGSATLHGEISTLENCGRLEGKVYKDTTLYTTLSPCDMCTGAIIM | |
| CD | YGIPRCVVGENVNFKSKGEKYLQTRGHEVVVVDDERCKKIMKQFIDERPQ | |
| | DWFEDIGE | |
| Rat | MSSETGPVAVDPTLRRRIEPHEFEVFFDPRELRKETCLLYEINWGGRHSI | 534 |
| APOBEC-1 | WRHTSQNTNKHVEVNFIEKFTTERYFCPNTRCSITWFLSWSPCGECSRAI | |
| (delta 177-186) | TEFLSRYPHVTLFIYIARLYHHADPRNRQGLRDLISSGVTIQIMTEQESG | |
| | YCWRNFVNYSPSNEAHWPRYPHLWVRGLPPCLNILRRKQPQLTFFTIALQ | |
| | SCHYQRLPPHILWATGLK | |
| Rat | MSSETGPVAVDPTLRRRIEPHEFEVFFDPRELRKETCLLYEINWGGRHSI | 535 |
| APOBEC-1 | WRHTSQNTNKHVEVNFIEKFTTERYFCPNTRCSITWFLSWSPCGECSRAI | |
| (delta 202-213) | TEFLSRYPHVTLFIYIARLYHHADPRNRQGLRDLISSGVTIQIMTEQESG | |
| | YCWRNFVNYSPSNEAHWPRYPHLWVRLYVLELYCIILGLPPCLNILRRKQ | |
| | PQHYQRLPPHILWATGLK | |
| Mouse | MGPFCLGCSHRKCYSPIRNLISQETFKFHFKNLGYAKGRKDTFLCYEVTR | 536 |
| APOBEC-3 | KDCDSPVSLHHGVFKNKDNIHAEICFLYWFHDKVLKVLSPREEFKITWYM | |
| | SWSPCFECAEQIVRFLATHHNLSLDIFSSRLYNVQDPETQQNLCRLVQEG | |
| | AQVAAMDLYEFKKCWKKFVDNGGRRFRPWKRLLINFRYQDSKLQEILRPC | |
| | YIPVPSSSSSTLSNICLTKGLPETRFCVEGRRMDPLSEEEFYSQFYNQRV | |
| | KHLCYYHRMKPYLCYQLEQFNGQAPLKGCLLSEKGKQHAEILFLDKIRSM | |
| | ELSQVTITCYLTWSPCPNCAWQLAAFKRDRPDLILHIYTSRLYFHWKRPF | |
| | QKGLCSLWQSGILVDVMDLPQFTDCWTNFVNPKRPFWPWKGLEIISRRTQ | |
| | RRLRRIKESWGLQDLVNDFGNLQLGPPMS | |

[0240] In some embodiments, the amino acid sequence of the nucleobase editor (or the functional fragment, functional variant, or domain thereof) comprises or consists of an amino acid sequence at least 85%, 86%, 87%, 88%, 89%, 90%, 91%, 92%, 93%, 94%, 95%, 96%, 97%, 98%, 99%, or 100% identical to the amino acid sequence of a polypeptide set forth in Table 3.

[0241] In some embodiments, the amino acid sequence of the nucleobase editor (or a functional fragment, functional variant, or domain thereof) comprises or consists of the amino acid sequence of a polypeptide set forth in Table 3, and further comprises 1 or more but less than 15% (less than 12%, less than 10%, less than 8%), amino acid variations (e.g., substitutions, additions, deletions, etc.). In some embodiments, the amino acid sequence of the nucleobase editor (or a functional fragment, functional variant, or domain thereof) comprises or consists of the amino acid sequence of a polypeptide set forth in Table 3, and further comprises or consists of at least about 1, 2, 3, 4, 5, 6, 7, 8, 9, or 10 amino acid variations (e.g., substitutions, additions, deletions, etc.). In some embodiments, the amino acid sequence of the nucleobase editor (or a functional fragment, functional variant, or domain thereof) comprises or consists of the amino acid sequence of a polypeptide set forth in Table 3, and further comprises or consists of about 1, 2, 3, 4, 5, 6, 7, 8, 9, or 10 amino acid variations (e.g., substitutions, additions, deletions, etc.). In some embodiments, the amino acid sequence of the nucleobase editor (or a functional fragment, functional variant, or domain thereof) comprises or consists of the amino acid sequence of a polypeptide set forth in Table 3, and further comprises or consists of no more than about 1, 2, 3, 4, 5, 6, 7, 8, 9, or 10 amino acid variations (e.g., substitutions, additions, deletions, etc.).

[0242] In some embodiments, the amino acid sequence of the nucleobase editor (or a functional fragment, functional variant, or domain thereof) comprises or consists of the amino acid sequence of a polypeptide set forth in Table 3, and further comprises 1 or more but less than 15% (less than 12%, less than 10%, less than 8%), amino acid substitutions. In some embodiments, the amino acid sequence of the nucleobase editor (or a functional fragment, functional variant, or domain thereof) comprises or consists of the amino acid sequence of a polypeptide set forth in Table 3, and further comprises or consists of at least about 1, 2, 3, 4, 5, 6, 7, 8, 9, or 10 amino acid substitutions. In some embodiments, the amino acid sequence of the nucleobase editor (or a functional fragment, functional variant, or domain thereof) comprises or consists of the amino acid sequence of a polypeptide set forth in Table 3, and further comprises or consists of about 1, 2, 3, 4, 5, 6, 7, 8, 9, or 10 amino acid substitutions. In some embodiments, the amino acid sequence of the nucleobase editor (or a functional fragment, functional variant, or domain thereof) comprises or consists of the amino acid sequence of a polypeptide set forth in Table 3, and further comprises or consists of no more than about 1, 2, 3, 4, 5, 6, 7, 8, 9, or 10 amino acid substitutions.

[0243] In some embodiments, the amino acid sequence of nucleobase editor (or a functional fragment, functional variant, or domain thereof) comprises or consists of an amino acid sequence at least 85%, 86%, 87%, 88%, 89%, 90%, 91%, 92%, 93%, 94%, 95%, 96%, 97%, 98%, 99%, or 100% identical to the amino acid sequence of any one of SEQ ID NOS: 477-536.

[0244] In some embodiments, the amino acid sequence of the nucleobase editor (or a functional fragment, functional variant, or domain thereof) comprises or consists of the amino acid sequence of any one of SEQ ID NOS: 477-536, and further comprises 1 or more but less than 15% (less than 12%, less than 10%, less than 8%), amino acid variations (e.g., substitutions, additions, deletions, etc.). In some embodiments, the amino acid sequence of the nucleobase editor (or a functional fragment, functional variant, or domain thereof) comprises or consists of the amino acid sequence of any one of SEQ ID NOS: 477-536, and further comprises or consists of at least about 1, 2, 3, 4, 5, 6, 7, 8, 9, or 10 amino acid variations (e.g., substitutions, additions, deletions, etc.). In some embodiments, the amino acid sequence of the nucleobase editor (or a functional fragment, functional variant, or domain thereof) comprises or consists of the amino acid sequence of any one of SEQ ID NOS: 477-536, and further comprises or consists of about 1, 2, 3, 4, 5, 6, 7, 8, 9, or 10 amino acid variations (e.g., substitutions, additions, deletions, etc.). In some embodiments, the amino acid sequence of the nucleobase editor (or a functional fragment, functional variant, or domain thereof) comprises or consists of the amino acid sequence of any one of SEQ ID NOS: 477-536, and further comprises or consists of no more than about 1, 2, 3, 4, 5, 6, 7, 8, 9, or 10 amino acid variations (e.g., substitutions, additions, deletions, etc.).

[0245] In some embodiments, the amino acid sequence of the nucleobase editor (or a functional fragment, functional variant, or domain thereof) comprises or consists of the amino acid sequence of any one of SEQ ID NOS: 477-536, and further comprises 1 or more but less than 15% (less than 12%, less than 10%, less than 8%), amino acid substitutions. In some embodiments, the amino acid sequence of the nucleobase editor (or a functional fragment, functional variant, or domain thereof) comprises or consists of the amino acid sequence of any one of SEQ ID NOS: 477-536, and further comprises or consists of at least about 1, 2, 3, 4, 5, 6, 7, 8, 9, or 10 amino acid substitutions. In some embodiments, the amino acid sequence of the nucleobase editor (or a functional fragment, functional variant, or domain thereof) comprises or consists of the amino acid sequence of any one of SEQ ID NOS: 477-536, and further comprises or consists of about 1, 2, 3, 4, 5, 6, 7, 8, 9, or 10 amino acid substitutions. In some embodiments, the amino acid sequence of the nucleobase editor (or the functional fragment or variant thereof) comprises or consists of the amino acid sequence of any one of SEQ ID NOS: 477-536, and further comprises or consists of no more than about 1, 2, 3, 4, 5, 6, 7, 8, 9, or 10 amino acid substitutions.

[0246] A nucleobase editor described herein can be further operably connected (e.g., fused) to another heterologous moiety (e.g., heterologous protein). In some embodiments, nucleobase editor described herein can be further operably connected (e.g., fused) to another heterologous moiety (e.g., heterologous protein). In some embodiments, the nucleobase editor is fused to an inhibitor of base excision repair, for example, a glycosylase inhibitor (UGI) domain or a nuclease dead inosine specific nuclease (dISN) domain.

### 4.3.2 Linkers

[0247] As described herein, a heterologous moiety (e.g., heterologous protein (e.g., reverse transcriptase, nucleobase editor)) can be directly operably connected or indirectly operably connected to a Cas endonuclease (e.g., described herein). In some embodiments, the heterologous protein is directly operably connected to a Cas endonuclease (e.g., described herein). In some embodiments, a heterologous polypeptide is directly operably connected to a Cas endonuclease (e.g., described herein) via a peptide bond. In some embodiments, a heterologous protein is indirectly operably connected to a Cas endonuclease (e.g., described herein). In some embodiments, a heterologous protein is indirectly operably connected to a Cas endonuclease (e.g., described herein) via a linker.

[0248] In some embodiments, a heterologous protein is indirectly operably connected to a Cas endonuclease (e.g., described herein) via a peptide linker. In some embodiments, a peptide linker is one or any combination of a cleavable linker, a non-cleavable linker, a flexible linker, a rigid linker, a helical linker, and/or a non-helical linker. In some embodiments, a peptide linker comprises from or from about 2-30, 5-30, 10-30, 15-30, 20-30, 25-30, 2-25, 5-25, 10-25, 15-25, 20-25, 2-20, 5-20, 10-20, 15-20, 2-15, 5-15, 10-15, 2-10, or 5-10 amino acid residues. In some embodiments, the peptide linker comprises at least about 2, 3, 4, 5, 6, 7, 8, 9, 10, 11, 12, 13, 14, 15, 16, 17, 18, 19, 20, 21, 22, 23, 24, 25, 26, 27, 28, 29, or 30 amino acid residues. In some embodiments, a linker comprises or consists of about 2, 3, 4, 5, 6, 7, 8, 9, 10, 11, 12, 13, 14, 15, 16, 17, 18, 19, 20, 21, 22, 23, 24, 25, 26, 27, 28, 29, or 30 amino acid residues. In some embodiments, the linker comprises or consists of no more than about 2, 3, 4, 5, 6, 7, 8, 9, 10, 11, 12, 13, 14, 15, 16, 17, 18, 19, 20, 21, 22, 23, 24, 25, 26, 27, 28, 29, or 30 amino acid residues. In some embodiments, the amino acid sequence of the peptide linker comprises or consists of glycine, serine, or both glycine and serine amino acid residues. In some embodiments, an amino acid sequence of the peptide linker comprises or consists of glycine, serine, and proline amino acid residues.

[0249] The amino acid sequence of exemplary peptide linkers is provided in Table 4.

TABLE 4
The Amino Acid Sequence of Exemplary Peptide Linker.

| | | SEQ ID |
|---|---|---|
| Description | Amino Acid Sequence | NO |
| A | GGG | 537 |
| B | GGGG | 538 |
| C | GGGGG | 539 |
| D | GGGGGG | 540 |
| E | GGGGGGG | 541 |
| F | GGGGGGGG | 542 |
| G | GSS | 543 |
| H | GSSGSS | 544 |
| I | GSSGSSGSS | 545 |
| J | GSSGSSGSSGSS | 546 |
| K | GSSGSSGSSGSSGSS | 547 |
| L | GSSGSSGSSGSSGSSGSS | 548 |
| M | GGS | 549 |
| N | GGSGGS | 550 |
| O | GGSGGSGGS | 551 |
| P | GGSGGSGGSGGS | 552 |
| Q | GGSGGSGGSGGSGGS | 553 |
| R | GGSGGSGGSGGSGGSGGS | 554 |
| S | GGGGS | 555 |
| T | GGGGSGGGGS | 556 |
| U | GGGGSGGGGSGGGGS | 557 |
| V | GGGGSGGGGSGGGGSGGGGSGGGGS | 558 |
| W | GGGGSGGGGSGGGGSGGGGSGGGGSGGGGS | 559 |
| X | GGSGGG | 560 |
| Y | GGGGGS | 561 |
| Z | GGSGSS | 562 |
| A-1 | GSSGGS | 563 |
| B-1 | GSS | 564 |
| C-1 | GSSGSS | 565 |
| D-1 | GSSGSSGSS | 566 |
| E-1 | GSSGSSGSSGSS | 567 |
| F-1 | GSSGSSGSSGSSGSS | 568 |
| G-1 | GSSGSSGSSGSSGSSGSS | 569 |
| H-1 | GGGGSS | 570 |
| I-1 | GGSGGGGSS | 571 |
| J-1 | GGSGSSGGG | 572 |
| K-1 | GGGGGSGSS | 573 |
| L-1 | GGGGSSGGS | 574 |
| M-1 | GSSGGSGGG | 575 |
| N-1 | GSSGGGGGS | 576 |
| O-1 | EAAAK | 577 |
| P-1 | EAAAKEAAAK | 578 |
| Q-1 | EAAAKEAAAKEAAAK | 579 |
| R-1 | EAAAKEAAAKEAAAKEAAAK | 580 |
| S-1 | EAAAKEAAAKEAAAKEAAAKEAAAK | 581 |
| T-1 | EAAAKEAAAKEAAAKEAAAKEAAAKEAAAK | 582 |
| U-1 | GGSGGGEAAAK | 583 |
| V-1 | GGSEAAAKGGG | 584 |
| W-1 | GGGGGSEAAAK | 585 |
| X-1 | GGGEAAAKGGS | 586 |
| Y-1 | EAAAKGGSGGG | 587 |
| Z-1 | EAAAKGGGGGS | 588 |
| A-2 | PAP | 589 |
| B-2 | PAPAP | 590 |
| C-2 | PAPAPAP | 591 |
| D-2 | PAPAPAPAP | 592 |
| E-2 | PAPAPAPAPAP | 593 |
| F-2 | PAPAPAPAPAPAP | 594 |
| G-2 | GGGPAP | 595 |
| H-2 | PAPGSS | 596 |
| I-2 | GGSGGGPAP | 597 |
| J-2 | GGSPAPGGG | 598 |
| K-2 | GGGGGSPAP | 599 |
| L-2 | GGGPAPGGS | 600 |
| M-2 | PAPGGSGGG | 601 |
| N-2 | PAPGGGGGS | 602 |
| O-2 | GGSGSSPAP | 603 |
| P-2 | GGSPAPGSS | 604 |
| Q-2 | GSSGGSPAP | 605 |
| R-2 | GSSPAPGGS | 606 |
| S-2 | PAPGGSGSS | 607 |
| T-2 | PAPGSSGGS | 608 |
| U-2 | GGGGSSPAP | 609 |
| V-2 | GGGPAPGSS | 610 |
| W-2 | GSSGGGPAP | 611 |
| X-2 | GSSPAPGGG | 612 |
| Y-2 | PAPGGGGSS | 613 |
| Z-2 | PAPGSSGGG | 614 |
| A-3 | GGSEAAAK | 615 |
| B-3 | PAPGGS | 616 |
| C-3 | GGGEAAAK | 617 |
| D-3 | EAAAKGGG | 618 |
| E-3 | GSSEAAAK | 619 |
| F-3 | EAAAKGSS | 620 |
| G-3 | EAAAKPAP | 621 |
| H-3 | PAPEAAAK | 622 |
| I-3 | GGSGSSEAAAK | 623 |
| J-3 | GGSEAAAKGSS | 624 |
| K-3 | GSSGGSEAAAK | 625 |
| L-3 | GSSEAAAKGGS | 626 |
| M-3 | EAAAKGGSGSS | 627 |
| N-3 | EAAAKGSSGGS | 628 |
| O-3 | GGSEAAAKPAP | 629 |
| P-3 | GGSPAPEAAAK | 630 |
| Q-3 | EAAAKGGSPAP | 631 |
| R-3 | EAAAKPAPGGS | 632 |
| S-3 | PAPGGSEAAAK | 633 |
| T-3 | PAPEAAAKGGS | 634 |
| U-3 | GGGGSSEAAAK | 635 |
| V-3 | GGGEAAAKGSS | 636 |
| W-3 | GSSGGGEAAAK | 637 |
| X-3 | GSSEAAAKGGG | 638 |
| Y-3 | EAAAKGGGGSS | 639 |
| Z-3 | EAAAKGSSGGG | 640 |
| A-4 | GGGEAAAKPAP | 641 |
| B-4 | GGGPAPEAAAK | 642 |
| C-4 | EAAAKGGGPAP | 643 |
| D-4 | EAAAKPAPGGG | 644 |
| E-4 | PAPGGGEAAAK | 645 |
| F-4 | PAPEAAAKGGG | 646 |
| G-4 | GSSEAAAKPAP | 647 |
| H-4 | GSSPAPEAAAK | 648 |
| I-4 | EAAAKGSSPAP | 649 |
| J-4 | EAAAKPAPGSS | 650 |
| K-4 | PAPGSSEAAAK | 651 |
| L-4 | PAPEAAAKGSS | 652 |
| M-4 | GGGGSEAAAKGGGGS | 653 |
| N-4 | EAAAKGGGGSEAAAK | 654 |
| O-4 | SGSETPGTSESATPES | 655 |
| P-4 | GSAGSAAGSGEF | 656 |
| Q-4 | SGGSSGGSSGSETPGTSESATPESSGGSSGGSS | 657 |
| R-4 | AEAAAKEAAAKEAAAKEAAAKALEAEAAAKEAAAKEAAAKE | 658 |
| | AAAKA | |

[0250] In some embodiments, an amino acid sequence of the peptide linker comprises or consists of the amino acid sequence of any one of the linkers set forth in Table 4. In some embodiments, the amino acid sequence of the peptide linker comprises or consists of the amino acid sequence of any one of the linkers set forth in Table 4, and further comprises 1 or more but less than 15% (less than 12%, less than 10%, less than 8%), amino acid variations (e.g., amino acid substitutions, deletions, or additions). In some embodiments, the amino acid sequence of the peptide linker comprises or consists of the amino acid sequence of any one of the linkers set forth in Table 4, comprising 1, 2, or 3 amino acid variations (e.g., substitutions, deletions, additions). In some embodiments, the amino acid sequence of the peptide linker comprises or consists of the amino acid sequence of any one of the linkers set forth in Table 4, and further comprises 1 or more but less than 15% (less than 12%, less than 10%, less than 8%), amino acid substitutions. In some embodiments, the amino acid sequence of the peptide linker comprises or consists of the amino acid sequence of any one of the linkers set forth in Table 4, comprising 1, 2, or 3 amino acid substitutions.

[0251] In some embodiments, an amino acid sequence of the peptide linker comprises or consists of the amino acid sequence of any one of SEQ ID NOS: 537-658. In some embodiments, the amino acid sequence of the peptide linker comprises or consists of the amino acid sequence of any one of SEQ ID NOS: 537-658, and further comprises 1 or more but less than 15% (less than 12%, less than 10%, less than 8%), amino acid variations (e.g., amino acid substitutions, deletions, or additions). In some embodiments, the amino acid sequence of the peptide linker comprises or consists of the amino acid sequence of any one of SEQ ID NOS: 537-658, comprising 1, 2, or 3 amino acid variations (e.g., substitutions, deletions, additions). In some embodiments, the amino acid sequence of the peptide linker comprises or consists of the amino acid sequence of any one of SEQ ID NOS: 537-658, and further comprises 1 or more but less than 15% (less than 12%, less than 10%, less than 8%), amino acid substitutions. In some embodiments, the amino acid sequence of the peptide linker comprises or consists of the amino acid sequence of any one of SEQ ID NOS: 537-658, comprising 1, 2, or 3 amino acid substitutions.

[0252] In some embodiments, the linker is a linker (or a functional fragment, functional variant, or domain thereof) described in WO2021178720 or WO2023039424, the entire contents of which are incorporated herein by reference for all purposes.

### 4.3.3 Orientation

[0253] The heterologous moiety (or moieties) (e.g., heterologous protein(s)) and the Cas endonuclease (e.g., described herein) (or a functional fragment, functional variant, or domain thereof) can be arranged in any configuration or order as long as the Cas endonuclease protein (e.g., described herein) (or a functional fragment, functional variant, or domain thereof) maintains the ability to mediate its function and in the embodiments wherein the heterologous moiety (e.g., heterologous protein) has a specific function, the heterologous moiety (e.g., heterologous protein) can mediate its function.

[0254] In some embodiments, the heterologous moiety (e.g., heterologous protein) is operably connected to the N-terminus, C-terminus, or internally between the N-terminus and the C-terminus of the Cas endonuclease (or a functional fragment, functional variant, or domain thereof). In some embodiments, a heterologous moiety (e.g., heterologous protein) is operably connected to the C-terminus of the Cas endonuclease (or the functional fragment, functional variant, or domain thereof). In some embodiments, a heterologous moiety (e.g., heterologous protein) is operably connected to the N-terminus of the endonuclease (or the functional fragment, functional variant, or domain thereof) and a heterologous moiety (e.g., heterologous protein) is operably connected to the C-terminus of the endonuclease (or the functional fragment, functional variant, or domain thereof).

[0255] In some embodiments, the heterologous moiety is a heterologous protein (e.g., a polymerase (e.g., a reverse transcriptase), a nucleobase editor (e.g., a deaminase) (e.g., described herein)) forming a fusion protein with a Cas endonuclease (or a functional fragment, functional variant, or domain thereof) (e.g., described herein). In some embodiments, the fusion protein comprises from N- to C-terminus: a Cas endonuclease (or a functional fragment, functional variant, or domain thereof) (e.g., described herein) and a heterologous protein (e.g., a polymerase (e.g., a reverse transcriptase), a nucleobase editor (e.g., a deaminase) (e.g., described herein)). In some embodiments, the fusion protein comprises from N- to C-terminus: a Cas endonuclease (or a functional fragment, functional variant, or domain thereof) (e.g., described herein), a peptide linker (e.g., described herein), and a heterologous protein (e.g., a polymerase (e.g., a reverse transcriptase), a nucleobase editor (e.g., a deaminase) (e.g., described herein)). In this specific orientation, the C-terminus of the endonuclease (or the functional fragment, functional variant, or domain thereof) (e.g., described herein) is operably connected to the N-terminus of the heterologous (e.g., a polymerase (e.g., a reverse transcriptase), a nucleobase editor (e.g., a deaminase) (e.g., described herein)) either directly or indirectly through the peptide linker (e.g., described herein).

[0256] In some embodiments, the heterologous moiety is a heterologous protein (e.g., a polymerase (e.g., a reverse transcriptase), a nucleobase editor (e.g., a deaminase) (e.g., described herein)) forming a fusion protein with a Cas endonuclease (or a functional fragment, functional variant, or domain thereof) (e.g., described herein). In some embodiments, the fusion protein comprises from N- to C-terminus: a heterologous protein (e.g., a polymerase (e.g., a reverse transcriptase), a nucleobase editor (e.g., a deaminase) (e.g., described herein)) and a Cas endonuclease (or a functional fragment, functional variant, or domain thereof) (e.g., described herein). In some embodiments, the fusion protein comprises from N- to C-terminus: a heterologous protein (e.g., a polymerase (e.g., a reverse transcriptase), a nucleobase editor (e.g., a deaminase) (e.g., described herein)), a peptide linker (e.g., described herein), and a Cas endonuclease (or a functional fragment, functional variant, or domain thereof) (e.g., described herein). In this specific orientation, the C-terminus of the heterologous (e.g., a polymerase (e.g., a reverse transcriptase), a nucleobase editor (e.g., a deaminase) (e.g., described herein)) is operably connected to the N-terminus of the endonuclease (or the functional fragment, functional variant, or domain thereof) (e.g., described herein) either directly or indirectly through the peptide linker (e.g., described herein).

### 4.4 Methods of Making Proteins

[0257] Proteins described herein (e.g., Cas endonucleases, fusion proteins, and conjugates) may be produced using standard methods known in the art. For example, each may be produced by recombinant technology in host cells (e.g., insect cells, mammalian cells, bacteria) that have been transfected or transduced with a nucleic acid expression vector (e.g., plasmid, viral vector (e.g., a baculoviral expression vector)) encoding the protein (e.g., the endonuclease, fusion protein, etc.). Such general methods are common knowledge in the art. The expression vector typically contains an expression cassette that includes nucleic acid sequences capable of bringing about expression of the nucleic acid molecule encoding the protein of interest (e.g., the Cas endonuclease, fusion protein, etc.), such as promoter(s), enhancer(s), polyadenylation signals, and the like. The person of ordinary skill in the art is aware that various promoter and enhancer elements can be used to obtain expression of a nucleic acid molecule in a host cell. For example, promoters can be constitutive or regulated, and can be obtained from various sources, e.g., viruses, prokaryotic or eukaryotic sources, or artificially designed. Post transfection or transduction, host cells containing the expression vector encoding the protein of interest are cultured under conditions conducive to expression of the nucleic acid molecule encoding the protein of interest (e.g., the endonuclease, fusion protein, etc.). Culture media is available from various vendors, and a suitable medium can be routinely chosen for a host cell to express a protein of interest. Host cells can be adherent or suspension cultures, and a person of ordinary skill in the art can optimize culture methods for specific host cells selected. For example, suspension cells can be cultured in, for example, bioreactors in e.g., a batch process or a fed-batch process. The produced protein may be isolated from the cell cultures, by, for example, column chromatography in either flow-flow through or bind-and-elute modes. Examples include, but are not limited to, ion exchange resins and affinity resins, such as lentil lectin Sepharose, and mixed mode cation exchange-hydrophobic interaction columns (CEX-HIC). The protein may be concentrated, buffer exchanged by ultrafiltration, and the retentate from the ultrafiltration may be filtered through an appropriate filter, e.g., a 0.22 μm filter. See, e.g., Hacker, David (Ed.), Recombinant Protein Expression in Mammalian Cells: Methods and Protocols (Methods in Molecular Biology), Humana Press (2018). See also U.S. Pat. No. 5,762,939, the entire contents of each of which is incorporated by reference herein for all purposes. Proteins described herein (e.g., Cas endonucleases, fusion proteins, and protein conjugates) may be produced synthetically.

[0258] The disclosure provides, inter alia, methods of making a protein described herein (e.g., a Cas endonuclease (or a functional fragment, functional variant, or domain thereof), a fusion protein, etc.) comprising (a) introducing a nucleic acid molecule encoding the protein (e.g., the endonuclease (or the functional fragment, functional variant, or domain thereof), the fusion protein etc.) into a host cell; (b) culturing the host cell (e.g., under conditions and for a period of time sufficient to allow expression of the protein (e.g., the Cas endonuclease (or the functional fragment, functional variant, or domain thereof), the fusion protein etc.); and optionally isolating the protein (e.g., the Cas endonuclease (or the functional fragment, functional variant, or domain thereof), the fusion protein etc.) from the culture medium.

[0259] The disclosure further provides methods of making a protein described herein (e.g., a Cas endonuclease (or a functional fragment, functional variant, or domain thereof), a fusion protein etc.) comprising (a) recombinantly expressing the protein (e.g., the Cas endonuclease (or a functional fragment, functional variant, or domain thereof), the fusion protein etc.); (b) enriching, e.g., purifying, the protein (e.g., the Cas endonuclease (or a functional fragment, functional variant, or domain thereof), the fusion protein etc.); (c) evaluating the protein (e.g., the Cas endonuclease (or a functional fragment, functional variant, or domain thereof), the fusion protein etc.) for the presence of a process impurity or contaminant, and (d) formulating the protein (e.g., the Cas endonuclease (or a functional fragment, functional variant, or domain thereof), the fusion protein etc.) as a pharmaceutical composition if the protein (e.g., the Cas endonuclease (or a functional fragment, functional variant, or domain thereof), the fusion protein etc.) meets a threshold specification for the process impurity or contaminant. The process impurity or contaminant evaluated may be one or more of, e.g., a process-related impurity such as host cell proteins, host cell DNA, or a cell culture component (e.g., inducers, antibiotics, or media components); a product-related impurity (e.g., precursors, fragments, aggregates, degradation products); or contaminants, e.g., endotoxin, bacteria, viral contaminants.

### 4.5 Systems

[0260] Further provided herein are, inter alia, systems comprising a Cas endonuclease (or a functional fragment, functional variant, or domain thereof) (e.g., described herein) (or a fusion protein or conjugate of the any of the foregoing (e.g., described herein)), useful in, inter alia, editing a nucleic acid molecule (e.g., DNA, genome, gene (e.g., within a cell, e.g., within a cell in a subject (e.g., a mammalian subject, e.g., a human subject))) (e.g., in vivo, ex vivo, or in vitro). In some embodiments, the systems are useful in mediating the addition, deletion, or substitution of one or more nucleotides (e.g., nucleic acid (DNA) molecules) into/from a target nucleic acid (e.g., DNA) molecule (e.g., a target double stranded DNA molecule) (e.g., within a cell, e.g., within a cell in a subject (e.g., a mammalian subject, e.g., a human subject))).

[0261] As such, provided herein are systems comprising (a) (i) a Cas endonuclease described herein (or a functional fragment, functional variant, or domain thereof); (ii) a fusion protein comprising a Cas endonuclease described herein (or a functional fragment or functional variant thereof) (e.g., described herein); (iii) a conjugate comprising a Cas endonuclease described herein (or a functional fragment or functional variant thereof) (e.g., described herein); (iv) a nucleic acid molecule encoding (a)(i), (a)(ii), and/or (a)(iii) (e.g., a nucleic acid molecule described herein); (v) a vector comprising (a)(iv) (e.g., a vector described herein); (vi) a carrier comprising any one of (a)(i)-(a)(v) (e.g., a carrier described herein); or (vii) a composition comprising any one of (a)(i)-(a)(vi) (e.g., a pharmaceutical composition described herein).

[0262] In some embodiments, the system comprises (a) (i) a Cas endonuclease described herein (or a functional fragment, functional variant, or domain thereof); (ii) a fusion protein comprising a Cas endonuclease described herein (or a functional fragment or functional variant thereof) (e.g., described herein); (iii) a conjugate comprising a Cas endonuclease described herein (or a functional fragment or functional variant thereof) (e.g., described herein); (iv) a nucleic acid molecule encoding (a)(i), (a)(ii), or (a)(iii) (e.g., a nucleic acid molecule described herein); (v) a vector comprising (a)(iv) (e.g., a vector described herein); (vi) a carrier comprising any one of (a)(i)-(a)(v) (e.g., a carrier described herein); or (vii) a composition (e.g., a pharmaceutical composition) comprising any one of (a)(i)-(a)(vi) (e.g., a composition (e.g., a pharmaceutical composition) described herein); and (b) (i) first gRNA (e.g., a crRNA and a tracrRNA; a sgRNA; a template RNA (e.g., as described herein)) or (ii) a nucleic acid (e.g., DNA) molecule encoding the first gRNA (e.g., a crRNA and a tracrRNA; a sgRNA; template RNA (e.g., as described herein)).

[0263] As described above, the systems provided herein are useful in, inter alia, editing a nucleic acid molecule (e.g., DNA, genome, gene (e.g., within a cell, e.g., within a cell in a subject (e.g., a mammalian subject, e.g., a human subject))) (e.g., in vivo, ex vivo, or in vitro). In some embodiments, the systems provided herein may comprise one or more (e.g., any combination thereof or all) of the following features: (a) the Cas endonuclease (or the functional fragment, functional variant, or domain thereof) of the system is capable of binding a gRNA (e.g., described herein); (b) the Cas endonuclease (or a functional fragment, functional variant, or domain thereof) of the system is capable of forming a break in a target nucleic acid (e.g., DNA (e.g., dsDNA)) molecule (e.g., described herein); (c) the Cas endonuclease (or a functional fragment, functional variant, or domain thereof) of the system is capable of forming a single strand break in the edited strand (as defined herein) of a target double stranded nucleic acid (e.g., DNA (e.g., dsDNA)) molecule (e.g., described herein); (d) the Cas endonuclease (or a functional fragment, functional variant, or domain thereof) of the system is capable of forming a single strand break in a target double stranded nucleic acid (e.g., DNA (e.g., dsDNA)) molecule (e.g., described herein); (e) the Cas endonuclease (or a functional fragment, functional variant, or domain thereof) of the system is capable of forming a double strand break in a target double stranded nucleic acid (e.g., DNA (e.g., dsDNA)) molecule (e.g., described herein); (f) the Cas endonuclease (or a functional fragment, functional variant, or domain thereof) of the system is incapable of forming a double strand break in a target double stranded nucleic acid (e.g., DNA (e.g., dsDNA)) molecule (e.g., described herein); (g) the Cas endonuclease (or a functional fragment, functional variant, or domain thereof) of the system is capable of forming a single strand break in a target double stranded nucleic acid (e.g., DNA (e.g., dsDNA)) molecule (e.g., described herein) and is incapable of forming a double strand break in a target double stranded nucleic acid (e.g., DNA (e.g., dsDNA)) molecule (e.g., described herein) (e.g., exhibits nickase activity); (h) the Cas endonuclease (or a functional fragment, functional variant, or domain thereof) of the system is capable of forming a single strand break in the edited strand (as defined herein) of a target double stranded nucleic acid (e.g., DNA (e.g., dsDNA)) molecule (e.g., described herein) and is incapable of forming a double strand break in a target double stranded nucleic acid (e.g., DNA (e.g., dsDNA)) molecule (e.g., described herein); and/or (i) the system is capable of mediating the addition, deletion, or substitution of one or more nucleotides into/from a target nucleic acid (e.g., DNA) molecule (e.g., a target double stranded DNA molecule) (e.g., described herein).

### 4.5.1 Target Nucleic Acid Molecules

[0264] As described above, in some embodiments, the system is capable of mediating any one of the foregoing effects (see, e.g., § 4.5) in a target nucleic acid molecule. In some embodiments, the target nucleic acid molecule is a DNA molecule. In some embodiments, the target nucleic acid molecule is a dsDNA molecule. In some embodiments, a portion of the nucleotide sequence of the non-edited strand (as defined herein) of the target dsDNA molecule is complementary to at least a portion of the nucleotide sequence of a gRNA of the system (e.g., a gRNA described herein (see, e.g., § 4.5.2)).

[0265] In some embodiments, the target nucleic acid molecule is within the genome of cell (e.g., a eukaryotic cell) (e.g., within a subject (e.g., a human subject)). In some embodiments, the target nucleic acid molecule is a gene (e.g., within a cell (e.g., a eukaryotic cell) (e.g., within a subject (e.g., a human subject)). In some embodiments, the target nucleic acid molecule is within the genome of a cell (e.g., a eukaryotic cell) in vitro, ex vivo, or in vivo. In some embodiments, the target nucleic acid molecule is within the genome of a cell (e.g., a eukaryotic cell) within a subject (e.g., a human subject).

4.5.2 gRNAs

[0266] In some embodiments, the system comprises a guide RNA (gRNA). gRNAs are generally known in the art and described herein. See, e.g., Nishimasu et al. Cell 156, P935-949 (2014), the entire contents of which are incorporated herein by reference for all purposes. As described above, gRNAs include RNAs comprising a crRNA and a tracrRNA; sgRNAs; and template RNAs (e.g., as described herein). In some embodiments, the system comprises a nucleic acid (e.g., DNA) molecule encoding any one or more of the foregoing gRNAs (e.g., a crRNA and a tracrRNA; a sgRNA; a template RNA (e.g., as described herein)). Where gRNAs are described herein, the disclosure further covers a nucleic acid (e.g., DNA) molecule encoding the gRNA.

[0267] In some embodiments, at least a portion of the nucleotide sequence of the gRNA is complementary to a portion of the nucleotide sequence of the target nucleic acid molecule (e.g., described herein). In some embodiments, at least a portion of the nucleotide sequence of the gRNA is complementary to a portion of the nucleotide sequence of the non-edited strand (as defined herein) of a double stranded nucleic acid (e.g., dsDNA) target nucleic acid molecule (e.g., described herein). In some embodiments, at least a portion of the nucleotide sequence of the gRNA binds to a portion of the nucleotide sequence of the edited strand (as defined herein) of a double stranded nucleic acid (e.g., dsDNA) target nucleic acid molecule (e.g., described herein).

[0268] In some embodiments, the system comprises a crRNA and a tracrRNA (or a plurality of different crRNAs and a plurality of different tracrRNAs), wherein the crRNA and the tracrRNA are on separate RNA molecules. In some embodiments, the system comprises a nucleic acid molecule encoding a crRNA and a separate nucleic acid molecule encoding a tracrRNA. In some embodiments, the system comprises a plurality of nucleic acid molecules each encoding a different crRNA; and a plurality of nucleic acid molecules each encoding a tracrRNA (wherein each encoded tracrRNA can be the same or different).

[0269] In some embodiments, the system comprises a sgRNA (or a plurality of different sgRNAs). In some embodiments, the system comprises a nucleic acid (e.g., DNA) molecule encoding a sgRNA. In some embodiments, the system comprises a plurality of nucleic acid molecules, each encoding a different sgRNA. In some embodiments, the crRNA of each of the sgRNAs of the plurality is different. In some embodiments, the tracrRNA of each of the sgRNAs of the plurality is different. In some embodiments, the tracrRNA of each of the sgRNAs of the plurality is the same. In some embodiments the crRNA of each of the sgRNAs of the plurality is different and the tracrRNA of each of the sgRNAs of the plurality is the same.

[0270] In some embodiments, the system comprises a template RNA (e.g., a single template RNA, a plurality of different template RNAs) or a nucleic acid (e.g., DNA) molecule encoding the template RNA (or a plurality of nucleic acid (e.g., DNA) molecules each encoding a different template RNA). In some embodiments, the template RNA comprises from 5′ to 3′ a crRNA, a tracrRNA, a heterologous object sequence, and a 3′ target homology domain. In some embodiments, the template RNA further comprises a sequence that binds a polymerase (e.g., a reverse transcriptase, e.g., of a fusion protein described herein). In some embodiments, the template RNA comprises a crRNA, a tracrRNA, a sequence that binds a polymerase (e.g., a reverse transcriptase, e.g., of a fusion protein described herein), a heterologous object sequence, and a 3′ target homology domain. In some embodiments, the template RNA comprises from 5′ to 3′ a crRNA, a tracrRNA, a sequence that binds a polymerase (e.g., a reverse transcriptase, e.g., of a fusion protein described herein), a heterologous object sequence, and a 3′ target homology domain.

[0271] In some embodiments, the gRNA (e.g., the template RNA) comprises a nucleic acid molecule comprising a toe-loop, hairpin, stem-loop, pseudoknot (e.g., a Mpknot1 moiety), aptamer, G-quadraplex, tRNA, riboswitch, or ribozyme. In some embodiments, the gRNA (e.g., the template RNA) comprises a nucleic acid molecule comprising a pseudoknot (e.g., a Mpknot1 moiety). In some embodiments, the gRNA one or more 3′hairpin elements may be removed, e.g., as described in WO2018106727, the entire contents of which is incorporated herein by reference for all purposes. In some embodiments, a gRNA may contain additional hairpin structures, e.g., as described in Kocak et al. Nat Biotechnol 37(6):657-666 (2019), the entire contents of which is incorporated herein by reference for all purposes. Secondary structures (e.g., hairpins) in a gRNA can be predicted in silico by software tools, e.g., the RNAstructure tool available at ma.urmc.rochester.edu/RNAstructureWeb (Bellaousov et al. Nucleic Acids Res 41: W471-W474 (2013); incorporated by reference herein in its entirety).

[0272] Custom gRNA generators and algorithms are available commercially for use in the design of gRNAs.

4.5.2.1 Multiple gRNAs

[0273] In some embodiments, the system comprises a plurality of gRNAs (e.g., a plurality of sgRNAs, a plurality of template RNAs). In some embodiments, the system comprises a plurality of nucleic acid molecules each encoding a gRNA (e.g., a sgRNA, a template RNA).

[0274] In some embodiments, the system comprises a first gRNA (e.g., a sgRNA, a template RNA) and a second gRNA (e.g., a sgRNA, a template RNA). In some embodiments, the first gRNA is a sgRNA and the second gRNA is a sgRNA. In some embodiments, the first gRNA is a sgRNA and the second gRNA is a sgRNA, wherein the nucleotide sequence of the crRNA of the first and second gRNAs is different. In some embodiments, the first gRNA is a template RNA and the second gRNA is a sgRNA. In some embodiments, the first gRNA is a template RNA and the second gRNA is a sgRNA, wherein the nucleotide sequence of the crRNA of the first and second gRNAs is different.

[0275] In some embodiments, the second gRNA (e.g., sgRNA) is capable of directing the endonuclease (e.g., described herein) of the system to form a single strand break in the non-edited strand of a target double stranded nucleic acid (e.g., dsDNA) molecule. In some embodiments, at least a portion of the nucleotide sequence of the second gRNA (e.g., sgRNA) is complementary to a portion of the nucleotide sequence of the edited strand (as defined herein) of a double stranded nucleic acid (e.g., dsDNA) molecule. In some embodiments, at least a portion of the nucleotide sequence of the second gRNA (e.g., sgRNA) binds to a portion of the nucleotide sequence of the edited strand (as defined herein) of a double stranded nucleic acid (e.g., dsDNA) molecule.

[0276] In some embodiments, the second gRNA (e.g., sgRNA) is present on the same nucleic acid molecule as the first gRNA (or the nucleic acid (e.g., DNA) molecule encoding the second gRNA is present on the same nucleic acid (e.g., DNA) molecule encoding the first gRNA). In some embodiments, the second gRNA (e.g., sgRNA) is present on a different nucleic acid molecule as the first gRNA (or the nucleic acid (e.g., DNA) molecule encoding the second gRNA is present on a different nucleic acid (e.g., DNA) molecule encoding the first gRNA).

4.5.2.2 Modified gRNAs

[0277] In some embodiments, a gRNA (e.g., of a system described herein) comprises one or more modified nucleotide(s) (as defined herein) (referred to as a modified gRNA). The modified gRNA may have one or more different (e.g., improved) properties relative to a corresponding unmodified gRNA (e.g., one or more improved properties in vivo). For example, in some embodiments, the modified gRNA (e.g., an end-modified gRNA) may exhibit increased stability in a cell (e.g., ex vivo, in vivo, in vitro) (e.g., relative to an unmodified gRNA). In some embodiments, the modified gRNA (e.g., an end-modified gRNA) may exhibit increased stability in vivo (e.g., relative to an unmodified gRNA). In some embodiments, a system described herein utilizing a modified gRNA exhibits increased nucleic acid (e.g., gene) editing efficiency (e.g., relative to system comprising an unmodified gRNA). In some embodiments, a system described herein utilizing a modified gRNA exhibits increased on target nucleic acid (e.g., gene) editing (e.g., relative to system comprising an unmodified gRNA). In some embodiments, a system described herein utilizing a modified gRNA exhibits decreased off target nucleic acid (e.g., gene) editing (e.g., relative to system comprising an unmodified gRNA). In some embodiments, a system described herein utilizing a modified gRNA exhibits increased affinity for DNA molecules (e.g., a gRNA of the system exhibits increased affinity for DNA molecules) editing (e.g., relative to system comprising an unmodified gRNA).

[0278] Methods known in the art can be utilized to select and test modified gRNAs. For example, structure-guided and systematic approaches (e.g., as described in Mir, A., Alterman, J. F., Hassler, M. R. et al. Heavily and fully modified RNAs guide efficient SpyCas9-mediated genome editing. Nat Commun 9, 2641 (2018). https://doi.org/10.1038/s41467-018-05073-z; the entire contents of which is incorporated herein by reference for all purposes) can be employed to find and select modifications for gRNAs.

[0279] gRNA modifications are known in the art and described herein. See, e.g., Allen Daniel, et al, Using Synthetically Engineered Guide RNAs to Enhance CRISPR Genome Editing Systems in Mammalian Cells, Frontiers in Genome Editing, Vol 2 (article 617910) (2021) DOI=10.3389/fgeed.2020.617910; and Hendel A, Bak R O, Clark J T, et al. Chemically modified guide RNAs enhance CRISPR-Cas genome editing in human primary cells. Nat Biotechnol. 2015; 33(9):985-989. doi:10.1038/nbt.3290; the entire contents of each of which are incorporated herein by reference for all purposes.

[0280] The exemplary modifications provided herein are mainly described in reference to a gRNA. It is to be understood that corresponding modifications could be made to a DNA molecule encoding a gRNA. Such corresponding DNA modifications are known in the art and readily determined by a person of ordinary skill in the art. As such, modifications made to a “gRNA” also include corresponding modifications made to a DNA molecule encoding the gRNA.

### (i) Nature of the Modifications

[0281] Nucleotide modifications can include modification to any one of more of the nucleoside and/or the internucleoside linkage. Nucleoside modifications include modification to the sugar (e.g., ribose) moiety and/or the nucleobase. In some embodiments, the modified gRNA comprises one or more nucleotides comprising a modified sugar (e.g., ribose) moiety. In some embodiments, the modified gRNA comprises one or more nucleotides comprising a modified nucleobase. In some embodiments, the modified gRNA comprises one or more nucleotides comprising a modified internucleoside linkage. In some embodiments, the modified gRNA comprises one or more nucleotides comprising one, two, or three of a modified sugar (e.g., ribose) moiety, a modified nucleobase, and/or a modified internucleoside linkage. In some embodiments, the modified gRNA comprises one or more nucleotides comprising a modified sugar (e.g., ribose) moiety and a modified internucleoside linkage.

[0282] Exemplary nucleoside modifications are described below and also known in the art, see, e.g., WO2018107028A1 (see, e.g., Table 4 (as identified therein by a SEQ ID NO)); US20190316121; Hendel A, Bak R O, Clark J T, et al. Chemically modified guide RNAs enhance CRISPR-Cas genome editing in human primary cells. Nat Biotechnol. 33(9):985-989 (2015) doi:10.1038/nbt.3290; Mir et al. Nat Commun 9:2641 (2018) (see, e.g., supplementary Table 1); Allen D, Rosenberg M and Hendel A (2021) Using Synthetically Engineered Guide RNAs to Enhance CRISPR Genome Editing Systems in Mammalian Cells. Front. Genome Ed. 2:617910. doi: 10.3389/fgeed.2020.617910; the entire contents of each of which are incorporated herein by reference for all purposes, the entire contents of each of which is incorporated by reference herein for all purposes.

### (a) Sugar Modifications

[0283] In some embodiments, the modified gRNA comprises one or more nucleosides comprising a modified sugar (e.g., ribose) moiety.

[0284] The modified ribose moiety can comprise, for example, a substituent at any one or more position of the sugar (e.g., ribose), including e.g., positions 2′, 4′, and/or 5′. In some embodiments, the modified sugar (e.g., ribose) comprises a substituent at 2′ position of the sugar (e.g., ribose). In some embodiments, the modified sugar (e.g., ribose) comprises a substituent at 4′ position of the sugar (e.g., ribose). In some embodiments, the modified sugar (e.g., ribose) comprises a substituent at 5′ position of the sugar (e.g., ribose).

[0285] In some embodiments, the gRNA comprises any one or more of the following substituents (e.g., at any position of the sugar (e.g., ribose) (e.g., at position 2′)): a group for improving the stability of the gRNA, a group for improving the pharmacokinetic properties of the gRNA, a group for improving the pharmacodynamic properties of the gRNA, an RNA cleaving group, a reporter group, an intercalator, or other substituents having similar properties.

[0286] Exemplary substituents include, for example, but are not limited to, substitution (e.g., at any position of the sugar (e.g., ribose) (e.g., at position 2′)) with any one of the following: OH; F; O—, S—, or N-alkyl; O—, S—, or N-alkenyl; O—, S- or N-alkynyl; or O-alkyl-O-alkyl, wherein the alkyl, alkenyl and alkynyl can be substituted or unsubstituted C₁ to C₁₀alkyl or C₂ to C₁₀ alkenyl and alkynyl. Additional exemplary substitutions (e.g., at any position of the sugar (e.g., ribose) (e.g., at position 2′)) include, for example, but are not limited to, substitution with any one of the following: O[(CH₂)ₙO]m, CH₃, O(CH₂)ₙOCH₃, O(CH₂)ₙNH₂, O(CH₂)ₙCH₃, O(CH₂)ₙONH₂, and O(CH₂)ₙON[(CH₂)·CH₃)]₂, where n and m are from 1 to about 10.

[0287] In some embodiments, the modified ribose comprises any one or more of the following modifications: 2′-O-methyl (2′-OMe); 2′0-methoxyethyl (2′-O-MOE); 2′deoxy-2′-fluoro (2′-F); 2′-arabino-fluoro (2′-Ara-F); 2′-O-benzyl; 2′-O-methyl-4-pyridine (2-O-methyl-4-pyridine (2′-O—CH₂Py(4)); 2′F-4′-Cα-OMe; or 2′,4′-di-Cα-OMe.

[0288] In some embodiments, the gRNA comprises any of the following substituents at the 2′-position of the sugar (e.g., ribose): C₁ to C₁₀ lower alkyl, substituted lower alkyl, alkaryl, aralkyl, O-alkaryl or O-aralkyl, SH, SCH₃, OCN, Cl, Br, CN, CF₃, OCF₃, SOCH₃, SO₂CH₃, ONO₂, NO₂, N₃, NH₂, heterocycloalkyl, heterocycloalkaryl, aminoalkylamino, polyalkylamino, or a substituted silyl. In some embodiments, the gRNA comprises a 2′-methoxyethoxy (2′-O—CH₂CH₂OCH₃, also known as 2′-O-(2-methoxyethyl) or 2′-MOE) (see, e.g., Martin et al., Helv. Chim. Acta, 1995, 78:486-504, the entire contents of which is incorporated by reference herein for all purposes) (i.e., an alkoxy-alkoxy group). In some embodiments, the gRNA comprises a 2′-dimethylaminooxyethoxy, i.e., a O(CH₂)₂ON(CH₃)₂ group, also known as 2′-DMAOE; a 2′-dimethylaminoethoxyethoxy (also known in the art as 2′-O-dimethylaminoethoxyethyl or 2′-DMAEOE), i.e., 2′-O—CH₂—O—CH₂—N(CH₃)₂; a 5′-Me-2′-F nucleotide, a 5′-Me-2′-OMe nucleotide, a 5′-Me-2′-deoxynucleotide, (both R and S isomers in these three families); a 2′-alkoxyalkyl; and 2′-NMA (N-methylacetamide).

### Non-Bicyclic Sugar Modifications

[0289] In some embodiments, the modified sugar (e.g., ribose) moiety comprises a non-bicyclic modified sugar (e.g., ribose) moiety. In some embodiments, the modified sugar (e.g., ribose) moiety comprises a furanosyl ring comprising one or more substituent groups none of which bridges two atoms of the furanosyl ring to form a bicyclic structure. In some embodiments one or more non-bridging substituent of a non-bicyclic modified ribose moiety is branched. Such non bridging substituents may be at any position of the furanosyl, including but not limited to substituents at the 2′, 4′, and/or 5′ positions.

[0290] In some embodiments, non-bicyclic modified sugar (e.g., ribose) moiety comprises a substituent group at the 2′-position of the sugar (e.g., ribose). Examples of 2′-substituent groups suitable for non-bicyclic modified ribose moieties include but are not limited to: 2′-O-methyl (2′-OMe), 2′0-methoxyethyl (2′-O-MOE), 2′deoxy-2′-fluoro (2′-F), 2′-arabino-fluoro (2′-Ara-F), 2′-O-benzyl, 2′-O-methyl-4-pyridine (2-O-methyl-4-pyridine (2′-O—CH₂Py(4)), and 2′-O—N-alkyl acetamide (e.g., 2′-O—N-methyl acetamide (“NMA”), 2′-O—N-dimethyl acetamide, 2′-O—N-ethyl acetamide, and 2′-O—N-propyl acetamide). For example, see, e.g., U.S. Pat. No. 6,147,200, Prakash et al., 2003, Org. Lett., 5, 403-6, the entire contents of which is incorporated by reference herein for all purposes.

[0291] In some embodiments, the 2′-substituent group is a halo, allyl, amino, azido, SH, CN, OCN, CF₃, OCF₃, O—C₁-C₁₀alkoxy, O—C₁-C₁₀ substituted alkoxy, O—C₁-C₁₀alkyl, O—C₁-C₁₀ substituted alkyl, S-alkyl, N(Rₘ)-alkyl, O-alkenyl, S-alkenyl, N(Rₘ)-alkenyl, O-alkynyl, S-alkynyl, N(Rₘ)-alkynyl, O-alkylenyl-O— alkyl, alkynyl, alkaryl, aralkyl, O-alkaryl, O-aralkyl, O(CH2)2SCH3,0(CH2)2ON(Rm)(Rn) or OCH2C(═O)— N(Rm)(Rn), where each Rₘ and Rₙ is, independently, H, an amino protecting group, or substituted or unsubstituted C₁-C₁₀ alkyl, or a 2′-substituent group described in any one of the following: Cook et al., U.S. Pat. No. 6,531,584; Cook et al., U.S. Pat. No. 5,859,221; and Cook et al., U.S. Pat. No. 6,005,087, the entire contents of which are incorporated herein by reference for all purposes. In some embodiments, these 2′-substituent groups can be further substituted with one or more substituent groups independently selected from among: hydroxyl, amino, alkoxy, carboxy, benzyl, phenyl, nitro (NO₂), thiol, thioalkoxy, thioalkyl, halogen, alkyl, aryl, alkenyl and alkynyl.

[0292] In some embodiments, a 2′-substituted non-bicyclic modified nucleoside comprises a sugar (e.g., ribose) moiety comprising a non-bridging 2′-substituent group selected from: F, NH₂, N₃, OCF₃, OCH₃, O(CH₂)₃NH₂, CH₂CH═CH₂, OCH₂CH═CH₂, OCH₂CH₂OCH₃, O(CH₂)₂SCH₃, O(CH₂)₂ON(Rₘ)(Rₙ), O(CH₂)₂O(CH₂)₂N(CH₃)₂, and N-substituted acetamide (OCH₂C(═O)—N(Rₘ)(Rₙ)), where each Rₘ and Rₙ is, independently, H, an amino protecting group, or substituted or unsubstituted C₁-C₁₀ alkyl. In some embodiments, a 2′-substituted non-bicyclic modified nucleoside comprises a sugar (e.g., ribose) moiety comprising a non-bridging 2′-substituent group selected from: F, OCF, OCH₃, OCH₂CH₂OCH₃, O(CH₂)₂SCH₃, O(CH₂)₂ON(CH₃)₂, O(CH₂)₂O(CH₂)₂N(CH₃)₂, and OCH₂C(═O)—N(H)CH₃ (“NMA”). In some embodiments, a 2′-substituted non-bicyclic modified nucleoside comprises a sugar (e.g., ribose) moiety comprising a non-bridging 2′-substituent group selected from: F, OCH₃, OCH₂CH₂OCH₃, and OCH₂C(═O)—N(H)CH₃.

[0293] In some embodiments, non-bicyclic modified sugar (e.g., ribose) moiety comprises a substituent group at the 3′-position of the sugar (e.g., ribose). Examples of substituent groups suitable for the 3′-position of modified sugar (e.g., ribose) moieties include but are not limited to alkoxy (e.g., methoxy), alkyl (e.g., methyl, ethyl).

[0294] In some embodiments, non-bicyclic modified sugar (e.g., ribose) moiety comprises a substituent group at the 4′-position of the sugar (e.g., ribose). Examples of 4′-substituent groups suitable for non-bicyclic modified sugar (e.g., ribose) moieties include but are not limited to alkoxy (e.g., methoxy), alkyl, and those described in Manoharan et al., WO 2015/106128.

[0295] In some embodiments, non-bicyclic modified sugar (e.g., ribose) moiety comprises a substituent group at the 5′-position of the sugar (e.g., ribose). Examples of substituent groups suitable for the 5′-position of modified sugar (e.g., ribose) moieties include, but are not limited to, vinyl (e.g., 5′-vinyl), alkoxy (e.g., methoxy (e.g., 5′-methoxy)), and alkyl (e.g., methyl (R or S) (e.g., 5′-methyl (R or S)), ethyl).

[0296] In some embodiments, non-bicyclic modified sugar (e.g., ribose) moieties comprise more than one non-bridging sugar substituent, for example, 2′-F-5′-methyl sugar (e.g., ribose) moieties and the modified sugar (e.g., ribose) moieties and modified nucleosides described in Migawa et al., WO 2008/101157 and Rajeev et al., US2013/0203836, the entire contents of each of which is incorporated herein by reference for all purposes.

[0297] In some embodiments, modified furanosyl sugar (e.g., ribose) moieties and nucleosides incorporating such modified furanosyl sugar (e.g., ribose) moieties are further defined by isomeric configuration. For example, a 2′-deoxyfuranosyl sugar (e.g., ribose) moiety may be in seven isomeric configurations other than the naturally occurring β-D-deoxyribosyl configuration. Such modified sugar (e.g., ribose) moieties are described in, e.g., WO 2019/157531, the entire contents of which are incorporated by reference herein for all purposes.

[0298] In some embodiments, the sugar (e.g., ribose) modification comprises an unlocked nucleotide (UNA). UNA is unlocked acyclic nucleic acid, wherein any of the bonds of the sugar has been removed, forming an unlocked sugar (e.g., ribose) residue. For example, in some embodiments, the bonds between C1′-C4′ have been removed (i.e., the covalent carbon-oxygen-carbon bond between the C1′ and C4′ carbons). In some embodiments, the C2′-C3′ bond (i.e., the covalent carbon-carbon bond between the C2′ and C3′ carbons) of the sugar (e.g., ribose) have been removed. See, e.g., Nuc. Acids Symp. Series, 52, 133-134 (2008) and Fluiter et al., Mol. Biosyst., 2009, 10, 1039, the entire contents of which are incorporated herein by reference. UNAs and methods of making are known in the art. See, e.g., U.S. Pat. No. 8,314,227; and US2013/0096289; US2013/0011922; and US2011/0313020, the entire contents of each of which are hereby incorporated herein by reference.

### Bicyclic Sugar Modifications

[0299] In some embodiments, the modified sugar (e.g., ribose) moiety comprises a substituent that bridges two atoms of the furanosyl ring to form a second ring, resulting in a bicyclic sugar (e.g., ribose) moiety. In some embodiments, the bicyclic sugar (e.g., ribose) moiety comprises a bridge between the 4′ and the 2′ furanose ring atoms. Examples of such 4′ to 2′ bridging sugar substituents include but are not limited to: 4′-CH₂-2′, 4′-(CH₂)₂-2′, 4′-(CH₂)₃-2′, 4′-CH₂—O—₂′ (“LNA”), 4′-CH₂—S-2′, 4′-(CH₂)2-O-2′ (“ENA”), 4′-CH(CH₃)—O-2′ (referred to as “constrained ethyl” or “cEt”), 4′-CH₂— O—CH₂-2′, 4′-CH₂—N(R)-2′, 4′-CH(CH₂OCH₃)—O-2′(“constrained MOE” or “cMOE”) and analogs thereof (see, e.g., Seth et al., U.S. Pat. No. 7,399,845, Bhat et al., U.S. Pat. No. 7,569,686, Swayze et al., U.S. Pat. No. 7,741,457, and Swayze et al., U.S. Pat. No. 8,022,193), 4′-C(CH₃)(CH₃)—O-2′ and analogs thereof (see, e.g., Seth et al., U.S. Pat. No. 8,278,283), 4′-CH₂—N(OCH₃)-2′ and analogs thereof (see, e.g., Prakash et al., U.S. Pat. No. 8,278,425), 4′-CH₂—O—N(CH₃)-2′ (see, e.g., Allerson et al., U.S. Pat. No. 7,696,345 and Allerson et al., U.S. Pat. No. 8,124,745), 4′-CH₂—C(H)(CH₃)-2′(see, e.g., Zhou, et al., J. Org. Chem., 2QQ9, 74, 118-134), 4′-CH₂—C(═CH₂)-2′ and analogs thereof (see, e.g., Seth et al., U.S. Pat. No. 8,278,426), 4′-C(RₐR_{b})—N(R)—O-2′, 4′-C(RₐR_{b})—O—N(R)-2′, 4′-CH₂—O—N(R)-2′, and 4′-CH₂—N(R)—O-2′, wherein each R, Rₐ, and R_{b} is, independently, H, a protecting group, or C₁-C₁₂ alkyl (see, e.g. Imanishi et al., U.S. Pat. No. 7,427,672). The entire contents of all of the foregoing references is incorporated by reference herein for all purposes.

[0300] In some embodiments, such 4′ to 2′ bridges independently comprise from 1 to 4 linked groups independently selected from: —[C(Rₐ)(R_{b})]n-, —[C(Rₐ)(R_{b})]n-O—, —C(Rₐ)═C(R_{b})—, —C(Rₐ)═N—, —C(═NRₐ)—, —C(═O)—, —C(═S)—, —O—, —Si(Rₐ)₂—, —S(═O)X—, and —N(Rₐ)—; wherein: x is 0, 1, or 2; n is 1, 2, 3, or 4; each Rₐ and Rb is, independently, H, a protecting group, hydroxyl, C₁-C₁₂ alkyl, substituted C₁-C₁₂ alkyl, C₂-C₁₂ alkenyl, substituted C₂-C₁₂ alkenyl, C₂-C₁₂ alkynyl, substituted C₂-C₁₂ alkynyl, C₅-C₂₀ aryl, substituted C₅-C₂₀ aryl, heterocycle radical, substituted heterocycle radical, heteroaryl, substituted heteroaryl, C₅-C₇ alicyclic radical, substituted C₅-C₇ alicyclic radical, halogen, OJ1, NJ1J2, SJ1, N3, COOJ1, acyl (C(═O)—H), substituted acyl, CN, sulfonyl (S(=0)2-J1), or sulfoxyl (S(═O)-J1); and each J1 and J2 is, independently, H, C₁-C₁₂ alkyl, substituted C₁-C₁₂ alkyl, C₂-C₁₂ alkenyl, substituted C₂-C₁₂ alkenyl, C₂-C₁₂ alkynyl, substituted C₂-C₁₂ alkynyl, C₅-C₂₀ aryl, substituted C₅-C₂₀ aryl, acyl (C(═O)—H), substituted acyl, a heterocycle radical, a substituted heterocycle radical, C₁-C₁₂ aminoalkyl, substituted C₁-C₁₂ aminoalkyl, or a protecting group.

[0301] Additional bicyclic sugar moieties are known in the art, see, for example: Freier et al., Nucleic Acids Research, 1997, 25(22), 4429-4443, Albaek et al., J. Org. Chem., 2006, 71, 7731-7740, Singh et al., Chem. Commun., 1998, 4, 455-456; Koshkin et al., Tetrahedron, 1998, 54, 3607-3630; Kumar et al., Bioorg. Med. Chem. Lett., 1998, 8, 2219-2222; Singh et al., J. Org. Chem., 1998, 63, 10035-10039; Srivastava et al., J. Am. Chem. Soc., 2007, 129, 8362-8379; Wengel et a., U.S. Pat. No. 7,053,207; Imanishi et al., U.S. Pat. No. 6,268,490; Imanishi et al. U.S. Pat. No. 6,770,748; Imanishi et al., U.S. RE44,779; Wengel et al., U.S. Pat. No. 6,794,499; Wengel et al., U.S. Pat. No. 6,670,461; Wengel et al., U.S. Pat. No. 7,034,133; Wengel et al., U.S. Pat. No. 8,080,644; Wengel et al., U.S. Pat. No. 8,034,909; Wengel et al., U.S. Pat. No. 8,153,365; Wengel et al., U.S. Pat. No. 7,572,582; Ramasamy et al., U.S. Pat. No. 6,525,191; Torsten et al., WO 2004/106356; Wengel et al., WO 1999/014226; Seth et al., WO 2007/134181; Seth et al., U.S. Pat. No. 7,547,684; Seth et al., U.S. Pat. No. 7,666,854; Seth et. al., U.S. Pat. No. 8,088,746; Seth et al., U.S. Pat. No. 7,750,131; Seth et al., U.S. Pat. No. 8,030,467; Seth et al., U.S. Pat. No. 8,268,980; Seth et al., U.S. Pat. No. 8,546,556; Seth et al., U.S. Pat. No. 8,530,640; Migawa et al., U.S. Pat. No. 9,012,421; Seth et al., U.S. Pat. No. 8,501,805; and U.S. Patent Publication Nos. Allerson et al., US2008/0039618 and Migawa et al., US2015/0191727. The entire contents of all of the foregoing references is incorporated by reference herein for all purposes.

[0302] In some embodiments, the modified sugar (e.g., ribose) comprises a constrained ethyl nucleotide comprising a 4′-CH(CH₃)—O-2′ bridge. In some embodiments, the constrained ethyl nucleotide is in the S conformation (S-cEt). In some embodiments, the modified sugar (e.g., ribose) comprises a conformationally restricted nucleotide (CRN). CRNs are nucleotide analogs with a linker connecting the C2′ and C4′ carbons of ribose or the C3 and C5′ carbons of ribose. Representative publications that teach the preparation of certain of the above include, but are not limited to, US2013/0190383; and WO2013/036868, the entire contents of each of which are hereby incorporated herein by reference.

[0303] In some embodiments, bicyclic sugar moieties and nucleosides incorporating such bicyclic sugar moieties are further defined by isomeric configuration. For example, an LNA nucleoside (described herein) may be in the α-L configuration or in the 3-D configuration. Herein, general descriptions of bicyclic nucleosides include both isomeric configurations. Any of the foregoing bicyclic nucleosides can be prepared having one or more stereochemical sugar configurations including for example α-L-ribofuranose and β-D-ribofuranose (see, e.g., WO 99/14226, the entire contents of which are incorporated herein by reference for all purposes).

[0304] Additional representative U.S. patents and U.S. patenttent Publications that teach the preparation of bicyclic nucleosides (e.g., locked nucleic acid) include, but are not limited to, the following: U.S. Pat. Nos. 6,268,490; 6,525,191; 6,670,461; 6,770,748; 6,794,499; 6,998,484; 7,053,207; 7,034,133; 7,084,125; 7,399,845; 7,427,672; 7,569,686; 7,741,457; 8,022,193; 8,030,467; 8,278,425; 8,278,426; 8,278,283; US 2008/0039618; and US 2009/0012281, the entire contents of each of which are hereby incorporated herein by reference.

### (b) Nucleobase Modifications

[0305] In some embodiments, the modified gRNA comprises one or more nucleotides comprising a modified nucleobase.

[0306] As used herein, “unmodified” nucleobases refer to the purine bases adenine (A) and guanine (G), and the pyrimidine bases thymine (T), cytosine (C), and uracil (U). Modified nucleobases include other synthetic and natural nucleobases.

[0307] Modified nucleobases include, but are not limited to, 5-substituted pyrimidines, 6-azapyrimidines, alkyl or alkynyl substituted pyrimidines, alkyl substituted purines, and N-2, N-6 and 0-6 substituted purines. In certain some embodiments, modified nucleobases are selected from: 5-methylcytosine, 2-aminopropyladenine, 5-hydroxymethyl cytosine, xanthine, hypoxanthine, deoxythimidine (dT), 2-aminoadenine, 6-N-methylguanine, 6-N-methyladenine, 2-propyladenine, 2-thiouracil, 2-thiothymine and 2-thiocytosine, 5-propynyl (—C═C—CH₃) uracil, 5-propynylcytosine, 6-azouracil, 6-azocytosine, 6-azothymine, 5-ribosyluracil (pseudouracil), 4-thiouracil, 8-halo, 8-amino, 8-thiol, 8-thioalkyl, 8-hydroxyl, 8-aza and other 8-substituted purines, 5-halo, particularly 5-bromo, 5-trifluoromethyl, 5-halouracil, and 5-halocytosine, 7-methylguanine, 7-methyladenine, 2-F-adenine, 2-aminoadenine, 7-deazaguanine, 7-deazaadenine, 3-deazaguanine, 3-deazaadenine, 6-N-benzoyladenine, 2-N-isobutyrylguanine, 4-N-benzoylcytosine, 4-N-benzoyluracil, 5-methyl 4-Nbenzoylcytosine, 5-methyl 4-N-benzoyluracil, universal bases, hydrophobic bases, promiscuous bases, size-expanded bases, and fluorinated bases. Further modified nucleobases include tricyclic pyrimidines, such as 1,3-diazaphenoxazine-2-one, 1,3-diazaphenothiazine-2-one and 9-(2-aminoethoxy)-1,3-diazaphenoxazine-2-one (G-clamp). Modified nucleobases may also include those in which the purine or pyrimidine base is replaced with other heterocycles, for example 7-deaza-adenine, 7-deazaguanosine, 2-aminopyridine and 2-pyridone. Further nucleobases include those disclosed in Merigan et al., U.S. Pat. No. 3,687,808; The Concise Encyclopedia Of Polymer Science And Engineering, Kroschwitz, J. I., Ed., John Wiley & Sons, 1990, 858-859; Englisch et al., Angewandte Chemie, International Edition, 1991, 30, 613; the entire contents of each of which is incorporated herein by reference for all purposes.

[0308] In some embodiments, the modified nucleobase comprises a pseudouridine, 2′thiouridine (s2U), N6′-methyladenosine, 5′methylcytidine (m⁵C), 5′fluoro-2′deoxyuridine, N-ethylpiperidine 7-EAA triazole modified adenine, N-ethylpiperidine 6′triazole modified adenine, 6-phenylpyrrolo-cytosine (PhpC), 2′,4′-difluorotoluyl ribonucleoside (rF), or 5′nitroindole. In some embodiments, the modified nucleobase comprises a 5-substituted pyrimidine; 6-azapyrimidine; or N-2, N-6 and 0-6 substituted purines (including 2-aminopropyladenine, 5-propynyluracil and 5-propynylcytosine). 5-methylcytosine substitutions have been shown to increase nucleic acid duplex stability by 0.6-1.2° C. (Sanghvi, Y. S., Crooke, S. T. and Lebleu, B., Eds., dsRNA Research and Applications, CRC Press, Boca Raton, 1993, pp. 276-278) and are exemplary base substitutions, even more particularly when combined with 2′-O-methoxyethyl sugar modifications.

[0309] Representative U.S. patents an published applications that teach the preparation of certain of the above noted modified nucleobases as well as other modified nucleobases include, but are not limited to, U.S. Pat. Nos. 3,687,808, 4,845,205; 5,130,30; 5,134,066; 5,175,273; 5,367,066; 5,432,272; 5,457,187; 5,459,255; 5,484,908; 5,502,177; 5,525,711; 5,552,540; 5,587,469; 5,594,121, 5,596,091; 5,614,617; 5,681,941; 5,750,692; 6,015,886; 6,147,200; 6,166,197; 6,222,025; 6,235,887; 6,380,368; 6,528,640; 6,639,062; 6,617,438; 7,045,610; 7,427,672; 7,495,088; 5,130,302; 5,134,066; 5,175,273; 5,367,066; 5,432,272; 5,434,257; 5,457,187; 5,459,255; 5,484,908; 5,502,177; 5,525,711; 5,552,540; U.S. Pat. Nos. 5,587,469; 5,594,121; 5,596,091; 5,614,617; 5,645,985; 5,681,941; 5,811,534; 5,750,692; 5,948,903; 5,587,470; 5,457,191; 5,763,588; 5,830,653; 5,808,027; 6,166,199; and 6,005,096, the entire contents of each of which is hereby incorporated herein by reference for all purposes.

### (c) Internucleoside Linkage Modifications

[0310] In some embodiments, the modified gRNA comprises one or more modified internucleoside linkage. Modified internucleoside linkages, compared to naturally occurring phosphate linkages, can be used to alter, typically increase, nuclease resistance of an agent (e.g., described herein).

[0311] The naturally occurring internucleoside linkage of RNA and DNA is a 3′ to 5′ phosphodiester linkage. In some embodiments, the modified internucleoside linkage contains a normal 3′-5′ linkage. In some embodiments, the modified internucleoside linkage contains a 2′-5′ linkage. In some embodiments, the modified internucleoside linkage has an inverted polarity wherein the adjacent pairs of nucleoside units are linked e.g., 3′-5′ to 5′-3′ or 2′-5′ to 5′-2′.

[0312] The two main classes of modified internucleoside linking can be defined by the presence or absence of a phosphorous atom.

### Modified Phosphorous Containing Internucleoside Linkages

[0313] In some embodiments, the modified internucleoside linkage comprises a phosphorous atom. Representative modified phosphorus-containing internucleoside linkages include but are not limited to phosphorothioates (PS (Rp isomer or Sp isomer)) (e.g., 5′phosphorothioate) (e.g., a chiral phosphorothioate), phosphotriesters, phosphoramidates (e.g., 3′-amino phosphoramidate and aminoalkylphosphoramidates), chiral phosphorothioates, phosphorodithioates (PS2), aminoalkylphosphotriesters, methyl and other alkyl phosphonates (e.g., methylphosphonate (MP), 3′-alkylene phosphonates), methpxypropyl-phosphonates (MOP), 5′-(E)-vinylphosphonates, 5′methyl phosphonates, (S)-5′C-methyl with phosphates, phosphinates, thionophosphoramidates, thionoalkylphosphonates, thionoalkylphosphotriesters, boranophosphates, phosphinates, and peptide nucleic acids (PNAs).

[0314] Methods of preparing polynucleotides containing one or more modified phosphorus-containing internucleoside linkage are known in the art. See, e.g., U.S. Pat. Nos. 3,687,808; 4,469,863; 4,476,301; 5,023,243; 5,177,195; 5,188,897; 5,264,423; 5,276,019; 5,278,302; 5,286,717; 5,321,131; 5,399,676; 5,405,939; 5,453,496; 5,455,233; 5,466,677; 5,476,925; 5,519,126; 5,536,821; 5,541,316; 5,550,111; 5,563,253; 5,571,799; 5,587,361; 5,625,050; 6,028,188; 6,124,445; 6,160,109; 6,169,170; 6,172,209; 6,239,265; 6,277,603; 6,326,199; 6,346,614; 6,444,423; 6,531,590; 6,534,639; 6,608,035; 6,683,167; 6,858,715; 6,867,294; 6,878,805; 7,015,315; 7,041,816; 7,273,933; 7,321,029; and U.S. Pat. RE39464, the entire contents of each of which are hereby incorporated herein by reference for all purposes.

### Modified Non-Phosphorous Containing Internucleoside Linkages

[0315] In some embodiments, the modified internucleoside linkage does not contain a phosphorous atom. Modified internucleoside linkages that do not include a phosphorus atom therein have backbones that are formed by short chain alkyl or cycloalkyl internucleoside linkages, mixed heteroatoms and alkyl or cycloalkyl internucleoside linkages, or one or more short chain heteroatomic or heterocyclic internucleoside linkages. These include those having morpholino linkages (formed in part from the sugar portion of a nucleoside); siloxane backbones; sulfide, sulfoxide and sulfone backbones; formacetyl and thioformacetyl backbones; methylene formacetyl and thioformacetyl backbones; alkene containing backbones; sulfamate backbones; methyleneimino and methylenehydrazino backbones; sulfonate and sulfonamide backbones; amide backbones; and others having mixed N, O, S, and CH₂ component parts.

[0316] Representative non-phosphorous containing internucleoside linking groups include but are not limited to methylenemethylimino (—CH₂—N(CH₃)—O—CH₂—), thiodiester, thionocarbamate (—O—C(═O)(NH)—S—); siloxane (—O—SiH₂—O—); and N,N′-dimethylhydrazine (—CH₂—N(CH₃)—N(CH₃)—).

[0317] Methods of preparing polynucleotides comprising modified internucleoside linkages do not contain a phosphorous atom are known in the art. See, e.g., U.S. Pat. Nos. 5,034,506; 5,166,315; 5,185,444; 5,214,134; 5,216,141; 5,235,033; 5,64,562; 5,264,564; 5,405,938; 5,434,257; 5,466,677; 5,470,967; 5,489,677; 5,541,307; 5,561,225; 5,596,086; 5,602,240; 5,608,046; 5,610,289; 5,618,704; 5,623,070; 5,663,312; 5,633,360; 5,677,437; and 5,677,439, the entire contents of each of which are hereby incorporated herein by reference.

### (d) Exemplary Combinations of Modifications

[0318] As described above, the recited exemplary modifications can be used in any (non-mutually exclusive combinations). For example, exemplary combinations of modifications include, 2′-O-Me 3′-phosphorothioate (MS) nucleotides; 2′-O-MOE 3′-phosphorothioate nucleotides; 2′-F 3′-phosphorothioate nucleotides; 2′-O-Me 3′-thioPACE (MSP) nucleotides; and 2′-deoxy 3′-phosphorothioate nucleotides.

### (ii) Location of Modifications

[0319] The modified nucleotides can be located at any suitable position throughout the gRNA (e.g., the terminal (e.g., 5′ terminal, 3′ terminal, or 5′ and 3′ terminal residues) of the full-length gRNA; any domain of the gRNA (e.g., the crRNA or tracrRNA of a sgRNA or a template RNA); internal residues of the full-length gRNA; etc).

[0320] In some embodiments, the terminal (e.g., 5′ terminal, 3′ terminal, or 5′ and 3′ terminal residues) of the gRNA are modified. In some embodiments, modification of the terminal residues reduces degradation of the gRNAs (e.g., in a cell) by exonucleases. In some embodiments, modification of the terminal residues increases stability of the gRNA (e.g., in a cell (e.g., in vitro, ex vivo, in vivo). In some embodiments, the 5′ terminus of the gRNA comprises one or more modified nucleotides. In some embodiments, the 5′ terminal 1, 2, 3, 4, or 5 nucleotides are modified. In some embodiments, the 3′ terminus of the gRNA comprises one or more modified nucleotides. In some embodiments, the 3′ terminal 1, 2, 3, 4, or 5 nucleotides are modified. In some embodiments, the 3′ terminus and the 5′ terminus of the gRNA comprises one or more modified nucleotides. In some embodiments, the 3′terminal 1, 2, 3, 4, or 5 nucleotides are modified and the 5′ terminal 1, 2, 3, 4, or 5 nucleotides are modified.

[0321] In some embodiments, one or more internal (i.e., non-terminal) nucleotides of the gRNA are modified. In some embodiments, modification of the internal residues reduces degradation of the gRNAs (e.g., in a cell) by endonucleases. In some embodiments, modification of the internal residues increases stability of the gRNA (e.g., in a cell (e.g., in vitro, ex vivo, in vivo). In some embodiments, at least 1, 2, 3, 4, 5, 6, 7, 8, 9, or 10, or more of the internal nucleotides of the gRNA are modified.

[0322] In some embodiments, one or more nucleotides of the crRNA (e.g., of a sgRNA of a template RNA) are modified. In some embodiments, one or more of the nucleotides of the seed region, the PAM-distal region, and/or the tracrRNA binding region of the crRNA (e.g., of a sgRNA of a template RNA) are modified. In some embodiments, the 3′ terminal and/or 5′ terminal nucleotides of the crRNA are modified. In some embodiments, at least 1, 2, 3, 4, 5, 6, 7, 8, 9, or 10, or more nucleotides of the crRNA (e.g., of a sgRNA of a template RNA) are modified. In some embodiments, one or more nucleotides of the tracrRNA (e.g., of a sgRNA of a template RNA) are modified. In some embodiments, one or more of the nucleotides of the tracrRNA (e.g., of a sgRNA of a template RNA) that do not interact with a Cas endonuclease (e.g., a Cas endonuclease described herein) are modified.

4.5.2.3 Methods of Making gRNAs

[0323] gRNAs can be generated according to standard nucleic acid synthesis methods known in the are described herein (see, e.g., § 4.6).

[0324] The generation of multi-domain gRNAs (e.g., sgRNAs, template gRNAs) may be assembled by the connection of two or more (e.g., two, three, four, five, six, seven, eight, nine, ten, or more) RNA segments with each other. For example, these gRNAs can be generated by contacting two or more linear RNA segments with each other under conditions that allow for the 5′ terminus of a first RNA segment to be covalently linked with the 3′ terminus of a second RNA segment. The joined molecule could be contacted with a third RNA segment under conditions that allow for the 5′ terminus of the joined molecule to be covalently linked with the 3′ terminus of the third RNA segment. The method could further comprise joining a fourth, fifth, or additional RNA segments to the elongated molecule. This form of assembly may, in some instances, allow for rapid and efficient assembly of gRNA molecules (e.g., multi region gRNAs (e.g., sgRNAs, template gRNAs)). See, e.g., US20160102322A1 (e.g., FIG. 10) and WO2021178720, the entire contents of each of which are incorporated herein by reference for all purposes.

[0325] In some embodiments, RNA segments may be produced by chemical synthesis. In some embodiments, RNA segments may be produced by in vitro transcription of a nucleic acid template, e.g., by providing an RNA polymerase to act on a cognate promoter of a DNA template to produce an RNA transcript. In some embodiments, in vitro transcription is performed using, e.g., a T7, T3, or SP6 RNA polymerase, or a derivative thereof, acting on a DNA, e.g., dsDNA, ssDNA, linear DNA, plasmid DNA, linear DNA amplicon, linearized plasmid DNA, e.g., encoding the RNA segment, e.g., under transcriptional control of a cognate promoter, e.g., a T7, T3, or SP6 promoter. In some embodiments, a combination of chemical synthesis and in vitro transcription is used to generate the RNA segments for assembly. In some embodiments, in vitro transcription may be better suited for the production of longer RNA molecules (as compared to chemical synthesis). In some embodiments, reaction temperature for in vitro transcription may be lowered, e.g., be less than 37° C. (e.g., between 0-10° C., 10-20° C., or 20-30° C.), to result in a higher proportion of full-length transcripts (Krieg Nucleic Acids Res 18:6463 (1990)). In some embodiments, a protocol for improved synthesis of long transcripts is employed to synthesize a long template RNA, e.g., a template RNA greater than 5 kb, such as the use of e.g., T7 RiboMAX Express, which can generate 27 kb transcripts in vitro (see, e.g., Thiel et al. J Gen Virol 82(6):1273-1281 (2001), the entire contents of which are incorporated herein by reference for all purposes). In some embodiments, modifications to RNA molecules as described herein may be incorporated during synthesis of RNA segments (e.g., through the inclusion of modified nucleotides or alternative binding chemistries), following synthesis of RNA segments through chemical or enzymatic processes, following assembly of one or more RNA segments, or a combination thereof.

[0326] Additional exemplary methods that may be used to connect RNA segments is by click chemistry (e.g., as described in U.S. Pat. Nos. 7,375,234; 7,070,941; US20130046084; and US20160102322A the entire contents of each of which are incorporated herein by reference for all purposes. Any click reaction may potentially be used to link RNA segments (e.g., Cu-azide-alkyne, strain-promoted-azide-alkyne, staudinger ligation, tetrazine ligation, photo-induced tetrazole-alkene, thiol-ene, NHS esters, epoxides, isocyanates, and aldehyde-aminooxy). In some embodiments, ligation of RNA molecules using a click chemistry reaction is advantageous because click chemistry reactions are fast, modular, efficient, often do not produce toxic waste products, can be done with water as a solvent, and/or can be set up to be stereospecific.

### 4.5.3 Nucleic Acid Editing Activity of Systems

[0327] As described above, the systems described herein are useful in, inter alia, editing (e.g., the addition, deletion, or substitution of one or more nucleotide) a target nucleic acid molecule (e.g., DNA, genome, gene (e.g., within a cell, e.g., within a cell in a subject (e.g., a mammalian subject, e.g., a human subject))) (e.g., in vivo, ex vivo, or in vitro).

[0328] In some embodiments, the system (e.g., a system described herein comprising a Cas endonuclease described herein) exhibits increased editing efficiency relative to the editing efficiency of a reference system comprising reference Cas endonuclease. In some embodiments, the system (e.g., a system described herein comprising a Cas endonuclease described herein) exhibits at least about a 30%, 35%, 40%, 45%, 50%, 55%, 60%, 65%, 70%, 75%, 80%, 85%, 90%, 95%, 100%, 110%, 120%, 130%, 140%, 150%, 160%, 170%, 180%, 190%, 200%, or more increase in editing efficiency relative to the editing efficiency of a reference system comprising reference Cas endonuclease. In some embodiments, the system (e.g., a system described herein comprising a Cas endonuclease described herein) exhibits at least about a 50%, 55%, 60%, 65%, 70%, 75%, 80%, 85%, 90%, 95%, 100%, or more increase in editing efficiency relative to the editing efficiency of a reference system comprising reference Cas endonuclease. In some embodiments, the system (e.g., a system described herein comprising a Cas endonuclease described herein) described herein exhibits an increase from about 30%-200%, 40%-200%, 50%-200%, 60%-200%, 70%-200%, 80%-200%, 90%-200%, 100%-200%, 150%-200%, 30%-150%, 40%-150%, 50%-150%, 60%-150%, 70%-150%, 80%-150%, 90%-150%, 100%-150%, 30%-100%, 40%-100%, 50%-100%, 60%-100%, 70%-100%, 80%-100%, or 90%-100%, or more increase in editing efficiency relative to the editing efficiency of a reference system comprising reference Cas endonuclease.

[0329] In some embodiments, the system (e.g., a system described herein comprising a Cas endonuclease described herein) exhibits increased editing efficiency relative to the editing efficiency of a system comprising the reference Cas endonuclease set forth in SEQ ID NO: 321. In some embodiments, the system (e.g., a system described herein comprising a Cas endonuclease described herein) exhibits at least about a 30%, 35%, 40%, 45%, 50%, 55%, 60%, 65%, 70%, 75%, 80%, 85%, 90%, 95%, 100%, 110%, 120%, 130%, 140%, 150%, 160%, 170%, 180%, 190%, 200%, or more increase in editing efficiency relative to the editing efficiency of a system comprising the reference Cas endonuclease set forth in SEQ ID NO: 321. In some embodiments, the system (e.g., a system described herein comprising a Cas endonuclease described herein) exhibits at least about a 50%, 55%, 60%, 65%, 70%, 75%, 80%, 85%, 90%, 95%, 100%, or more increase in editing efficiency relative to the editing efficiency of a system comprising the reference Cas endonuclease set forth in SEQ ID NO: 321. In some embodiments, the system (e.g., a system described herein comprising a Cas endonuclease described herein) exhibits an increase from about 30%-200%, 40%-200%, 50%-200%, 60%-200%, 70%-200%, 80%-200%, 90%-200%, 100%-200%, 150%-200%, 30%-150%, 40%-150%, 50%-150%, 60%-150%, 70%-150%, 80%-150%, 90%-150%, 100%-150%, 30%-100%, 40%-100%, 50%-100%, 60%-100%, 70%-100%, 80%-100%, or 90%-100%, or more increase in editing efficiency relative to the editing efficiency of a system comprising the reference Cas endonuclease set forth in SEQ ID NO: 321.

### 4.5.4 Methods of Assessing Nucleic Acid Editing Activity of Systems

[0330] Standard methods of assessing the editing of a target nucleic acid molecule (e.g., in a cell) by a system described herein are known in the art and described herein. See, e.g., Maja Gehre et. al. Efficient strategies to detect genome editing and integrity in CRISPR-Cas9 engineered ESCs, bioRxiv 635151; doi: https://doi.org/10.1101/635151 Glaser A, McColl B, Vadolas J. GFP to BFP Conversion: A Versatile Assay for the Quantification of CRISPR/Cas9-mediated Genome Editing [published correction appears in Mol Ther Nucleic Acids. 2016 Sep. 13; 5(9):e360]. Mol Ther Nucleic Acids. 2016; 5(7):e334. Published 2016 Jul. 12. doi:10.1038/mtna.2016.48, the entire contents of each of which are incorporated by reference herein for all purposes. For example, standard nucleic acid sequencing methods (e.g., next generation sequencing, Sanger sequencing), assessment of a phenotype associated with a specific target edit, a mismatch detection assay, or a restriction fragment length polymorphism assay.

[0331] For example, for monitoring gene editing of a target DNA, mammalian cells, e.g., HEK293T or U2OS cells, carrying a target DNA may be utilized. In other embodiments for monitoring gene editing of a target DNA, mammalian cells, e.g., HEK293T or U2OS cells, carrying a target DNA genomic landing pad may be utilized. In particular embodiments, the target DNA genomic landing pad may comprise a gene to be edited for treatment of a disease or disorder of interest. In other particular embodiments, the target DNA is a gene sequence that expresses a protein that exhibits detectable characteristics that may be monitored to determine whether gene editing has occurred. For example, in certain embodiments, a blue fluorescence protein (BFP)—or green fluorescence protein (GFP)-expressing genomic landing pad is utilized. In certain embodiments, mammalian cells, e.g., HEK293T or U2OS cells, comprising a target DNA, e.g., a target DNA genomic landing pad, are seeded in culture plates at 500×-3000× cells per editing system and transduced at a 0.2-0.3 multiplicity of infection (MOI) to minimize multiple infections per cell. Puromycin (2.5 ug/mL) may be added 48 hours post infection to allow for selection of infected cells. In such an embodiment, cells may be kept under puromycin selection for at least 7 days and then scaled up for gRNA (e.g., template RNA) introduction (e.g., electroporation, e.g., template RNA electroporation).

[0332] To ascertain whether gene editing occurs, mammalian cells containing a target DNA to be edited may be infected with a candidate endonuclease (or a fusion protein thereof (e.g., a reverse-transcriptase based fusion protein)) then transfected with guide RNA (e.g., template RNA) designed for use in editing of the target DNA. Subsequently, the cells may be analyzed to determine whether editing of the target DNA has occurred according to the designed outcome, or whether no editing or imperfect editing has occurred, e.g., by using cell sorting and sequence analysis.

[0333] In a particular embodiment, to ascertain whether gene editing occurs, BFP—or GFP-expressing mammalian cells, e.g., HEK293T or U2OS cells, may be infected with a candidate endonuclease (or a fusion protein thereof (e.g., a reverse-transcriptase based fusion protein)) and then transfected or electroporated with guide RNA plasmid or RNA (e.g., template RNA plasmid or RNA), e.g., by electroporation of ˜250,000 cells/well with 200 ng of a guide RNA plasmid or RNA (e.g., template RNA plasmid or RNA) designed to convert BFP-to-GFP or GFP-to-BFP, at a cell count ensuring >250×-1000× coverage per candidate. In such an embodiment, the gene-editing capacity of the various constructs in this assay may be assessed by sorting the cells by Fluorescence-Activated Cell Sorting (FACS) for expression of the color-converted fluorescent protein (FP) at 4-10 days post-electroporation. Cells are sorted and harvested as distinct populations of unedited cells (exhibiting original florescence protein signal), edited cells (exhibiting converted fluorescence protein signal), and imperfect edit (exhibiting no florescence protein signal) cells. A sample of unsorted cells may also be harvested as the input population to determine candidate enrichment during analysis. The site of targeted editing may also be analyzed by standard sequencing (e.g., next-generation sequencing methods).

### 4.5.5 Exemplary Systems

[0334] Exemplary systems are provided below that incorporate components described above. The exemplary systems include exemplary homology directed repair (HDR) based editing systems; reverse transcriptase-based editing systems; and nucleobase editor-based editing systems. The systems are exemplary and not intended to be limiting.

### 4.5.5.1 HDR Based Editing Systems

[0335] Provided herein are, inter alia, HDR based systems (e.g., for use in editing target nucleic acid molecules, e.g., in cells, e.g., within a subject). In some embodiments, the system comprises (a) (i) a Cas endonuclease described herein (or a functional fragment, functional variant, or domain thereof); (ii) a fusion protein comprising a Cas endonuclease described herein (or a functional fragment or functional variant thereof) (e.g., described herein); (iii) a conjugate comprising a Cas endonuclease described herein (or a functional fragment or functional variant thereof) (e.g., described herein); (iv) a nucleic acid molecule encoding (a)(i), (a)(ii), or (a)(iii) (e.g., a nucleic acid molecule described herein); (v) a vector comprising (a)(iv) (e.g., a vector described herein); (vi) a carrier comprising any one of (a)(i)-(a)(v) (e.g., a carrier described herein); or (vii) a composition comprising any one of (a)(i)-(a)(vi) (e.g., a composition (e.g., a pharmaceutical composition) described herein); (b) (i) a gRNA comprising (i-a) a crRNA and a tracrRNA, wherein the crRNA and a tracrRNA are on separate nucleic acid molecules or (i-b) a sgRNA; (ii) one or more DNA molecule encoding (b) (i); (iii) a vector comprising (b)(i) or (b)(ii) (e.g., a vector described herein); (iv) a carrier comprising any one of (b)(i)-(b)(iii) (e.g., a carrier described herein); or (v) a composition (e.g., a pharmaceutical composition) comprising any one of (b)(i)-(b)(iv) (e.g., a composition (e.g., a pharmaceutical composition) described herein); and (c) (i) a donor template nucleic acid (e.g., DNA) molecule (e.g., as defined herein) (ii) a vector comprising (c)(i) (e.g., a vector described herein); (iii) a carrier comprising any one of (c)(i)-(c)(ii) (e.g., a carrier described herein); or (iv) a composition (e.g., a pharmaceutical composition) comprising any one of (c)(i)-(c)(iii) (e.g., a composition (e.g., a pharmaceutical composition) described herein).

[0336] Without wishing to be bound by theory, the HDR system can be utilized e.g., in methods of editing a target nucleic acid molecule (e.g., methods described herein), wherein the molecular machinery of the cell (e.g., in a subject, ex vivo, or in vitro) will utilize the donor template nucleic acid molecule in repairing and/or resolving a cleavage site in a target nucleic acid molecule mediated by a Cas endonuclease (or functional fragment, functional variant, or domain thereof) (e.g., of the system), wherein donor sequence will be incorporated into the target nucleic acid molecule through e.g., HDR. See, e.g., U.S. Pat. No. 8,697,359, the entire contents of which is incorporated herein by reference for all purposes.

[0337] In some embodiments, the endonuclease (or the functional fragment, functional variant, or domain thereof) has the ability to mediate double strand breaks in a target double stranded nucleic acid (e.g., DNA) molecule.

[0338] In some embodiments, the donor template nucleic acid molecule comprises at least about 10, 20, 30, 40, 50, 60, 70, 80, 90, 100, 150, 200, 300, 400, or 500 or more nucleotides. In some embodiments, the donor template nucleic acid molecule comprises from about 10-500, 10-400, 10-300, 10-200, 10-100, 10-90, 10-80, 10-70, 10-60, 10-50, 10-40, 10-30, or 10-20 nucleotides. In some embodiments, the donor template nucleic acid molecule comprises about 10, 20, 30, 40, 50, 60, 70, 80, 90, 100, 150, 200, 300, 400, or 500 or more nucleotides. In some embodiments, the donor sequence of the donor template nucleic acid molecule comprises a substitution, addition, deletion, inversion, or another modification (e.g., relative to the nucleotide sequence of the target nucleic acid molecule).

[0339] In some embodiments, each homology arm of the donor template nucleic acid molecule comprises at least about 10, 15, 20, 30, 40, 50, 60, 70, 80, 90, 100, 200, or 300 nucleotides. In some embodiments, each homology arm of the donor template nucleic acid molecule comprises from about 10-300, 10-200, 10-100, 10-90, 10-80, 10-70, 10-60, 10-50, 10-40, 10-30, 10-20, or 10-15 nucleotides. In some embodiments, each homology arm of the donor template nucleic acid molecule comprises about 10, 15, 20, 30, 40, 50, 60, 70, 80, 90, 100, 200, or 300 nucleotides. In some embodiments, each homology arm shares at least about 70%, 80%, 85%, 90%, 91%, 92%, 93%, 94%, 95%, 96%, 97%, 98%, 99%, or 100% sequence homology to its target sequence. In some embodiments, the target sequence of the homology arms is immediately flanking the endonuclease cleavage site. In some embodiments, the target sequence of the homology arms is within about 1, 2, 3, 4, 5, 6, 7, 8, 9, 10, 15, 20, or 30 nucleotides of the endonuclease cleavage site.

[0340] In some embodiments, the donor template nucleic acid molecule is a ssDNA molecule, ssRNA molecule, dsDNA molecule, or dsRNA molecule. In some embodiments, the donor template nucleic acid molecule of the system is a linear nucleic acid molecule. In some embodiments, the donor template nucleic acid molecule of is a circular nucleic acid molecule. In some embodiments, the donor template nucleic acid molecule of comprised in a vector and/or carrier. In some embodiments, the donor template nucleic acid molecule of comprises one or more modified nucleotides. Nucleotide modifications are known in the art and described herein. For example, one or more nucleotides may be modified to increase stability, decrease degradation (e.g., by endonucleases and/or exonucleases). Exemplary modifications include, but are not limited to, 2′-O-methyl (2′-OMe); 2′O-methoxyethyl (2′-O-MOE); 2′deoxy-2′-fluoro (2′-F); 2′-arabino-fluoro (2′-Ara-F); 2′-O-benzyl; 2′-O-methyl-4-pyridine (2-O-methyl-4-pyridine (2′-O—CH₂Py(4)); 2′F-4′-Cα-OMe; or 2′,4′-di-Cα-OMe, deoxyribose, phosphorothioates (PS (Rp isomer or Sp isomer)) (e.g., 5′phosphorothioate) (e.g., a chiral phosphorothioate), phosphotriesters, phosphoramidates (e.g., 3′-amino phosphoramidate and aminoalkylphosphoramidates), chiral phosphorothioates, phosphorodithioates (PS2), aminoalkylphosphotriesters, methyl and other alkyl phosphonates (e.g., methylphosphonate (MP), 3′-alkylene phosphonates), methpxypropyl-phosphonates (MOP), 5′-(E)-vinylphosphonates, 5′methyl phosphonates, (S)-5′C-methyl with phosphates, phosphinates, thionophosphoramidates, thionoalkylphosphonates, thionoalkylphosphotriesters, boranophosphates, phosphinates, and peptide nucleic acids (PNAs), and any combination thereof. See, also, § 4.5.2.2 herein, which describes modified gRNAs. Any of the modifications described in § 4.5.2.2 may also be utilized in the context of a donor template nucleic acid molecule.

[0341] In some embodiments, the donor sequence of the donor template nucleic acid molecule comprises e.g., restriction sites, nucleotide polymorphisms, selectable markers (e.g., drug resistance genes, fluorescent proteins, enzymes etc.), etc., which may be used to assess for successful addition of the donor sequence of the donor template nucleic acid molecule at the cleavage site or in some cases may be used for other purposes (e.g., to signify expression at the target nucleic acid sequence (e.g., gene)). In some cases, if located in a coding region, such nucleotide sequence differences will not change the amino acid sequence, or will make silent amino acid changes (i.e., changes which do not affect the structure or function of the protein). Alternatively, these sequences differences may include flanking recombination sequences such as FLPs, loxP sequences, or the like, that can be activated at a later time for removal of the marker sequence.

### 4.5.5.2 RT Based Editing Systems

[0342] Provided herein are, inter alia, RT based systems (e.g., for use in editing target nucleic acid molecules, e.g., in cells, e.g., within a subject). In some embodiments, the system comprises (a) (i) a fusion protein comprising a Cas endonuclease described herein (or a functional fragment, functional variant, or domain thereof) (e.g., described herein) and a reverse transcriptase (or a functional fragment, functional variant, or domain thereof) (e.g., described herein) (see, e.g., § 4.3.1.1); (ii) a nucleic acid molecule encoding (a)(i) (e.g., a nucleic acid molecule described herein); (iii) a vector comprising (a)(ii) (e.g., a vector described herein); (iv) a carrier comprising any one of (a)(i)-(a)(iii) (e.g., a carrier described herein); or (v) a composition comprising any one of (a)(i)-(a)(iv) (e.g., a composition (e.g., a pharmaceutical composition) described herein); and (b) (i) a template RNA (e.g., described herein) (see, e.g., § 4.5.2); (ii) a DNA molecule encoding (b)(i); (iii) a vector comprising (b)(i) or (b)(ii) (e.g., a vector described herein); (iv) a carrier comprising any one of (b)(i)-(b)(iii) (e.g., a carrier described herein); or (v) a composition comprising any one of (b)(i)-(b)(iv) (e.g., a composition (e.g., a pharmaceutical composition) described herein).

[0343] Without wishing to be bound by theory, the RT based editing system can be utilized e.g., in methods of editing a target nucleic acid molecule (e.g., methods described herein), wherein the template nucleic acid binds to a target nucleic acid molecule (e.g., a double stranded nucleic acid molecule (e.g., a dsDNA molecule)) and binds to the fusion protein to thereby localize the fusion protein to the target nucleic acid molecule. Subsequently the Cas endonuclease of the fusion protein cleaves the target nucleic acid molecule (e.g., a single strand of a target double stranded nucleic acid molecule (e.g., a dsDNA molecule)) allowing the 3′ homology domain to bind a sequence adjacent to the site to be edited on the target nucleic acid molecule (e.g., on the edited strand of a double stranded nucleic acid molecule (e.g., a dsDNA molecule)). It is thought that the reverse transcriptase domain of the fusion protein utilizes the 3′ target homology domain as a primer and the edit template as a template to, e.g., polymerize a sequence complementary to the edit template. Without wishing to be bound by theory, it is thought that selection of an appropriate edit template can result in editing of the nucleotide sequence of the target site (e.g., the substitution, deletion, or addition of one or more nucleotides at the target site), wherein a cell's endogenous DNA repair machinery resolves the mismatched double stranded nucleic acid molecule (e.g., dsDNA) to incorporate the desired edit. See, e.g., WO2021178720 and WO2023039424, the entire contents of each of which are incorporated herein by reference for all purposes.

[0344] In some embodiments, the Cas endonuclease (a) has the ability to mediate single strand breaks in a target double stranded nucleic acid (e.g., DNA) molecule; (b) is not able to mediate double strand breaks in a target double stranded nucleic acid (e.g., DNA) molecule; (c) has the ability to mediate single strand breaks in a target double stranded nucleic acid (e.g., DNA) molecule and is not able to mediate double strand breaks in a target double stranded nucleic acid (e.g., DNA) molecule (i.e., nickase activity); and/or (d) has RNA guided DNA endonuclease activity; or any combination of the foregoing.

[0345] In some embodiments, the target nucleic acid molecule of the system is a double stranded nucleic acid (e.g., dsDNA) molecule, wherein one strand of the double stranded nucleic acid (e.g., dsDNA) molecule is targeted for editing. In some embodiments, the system further comprises a gRNA (e.g., sgRNA) that is capable of directing the Cas endonuclease (e.g., described herein) of the system to form a single strand break (i.e., a nick) in the non-edited strand of a target double stranded nucleic acid (e.g., dsDNA) molecule. Without wishing to be bound by theory it is thought that the nicking of the non-edited strand of a target double stranded nucleic acid molecule (e.g., a target dsDNA molecule) induces preferential replacement of the edited strand. In some embodiments, at least a portion of the nucleotide sequence of the gRNA (e.g., sgRNA) is complementary to a portion of the nucleotide sequence of the edited strand (as defined herein) of the target double stranded nucleic acid (e.g., dsDNA) molecule. In some embodiments, at least a portion of the nucleotide sequence of the second gRNA (e.g., sgRNA) binds to a portion of the nucleotide sequence of the edited strand (as defined herein) of a double stranded nucleic acid (e.g., dsDNA) molecule. In some embodiments, the gRNA is a sgRNA. In some embodiments, the gRNA (e.g., sgRNA) is present on the same nucleic acid molecule as the template gRNA (or the nucleic acid (e.g., DNA) molecule encoding the gRNA is present on the same nucleic acid (e.g., DNA) molecule encoding the template gRNA). In some embodiments, the gRNA (e.g., sgRNA) is present on a different nucleic acid molecule as the template gRNA (or the nucleic acid (e.g., DNA) molecule encoding the gRNA is present on a different nucleic acid (e.g., DNA) molecule encoding the template gRNA).

[0346] In some embodiments, a Cas endonuclease described herein (or a functional fragment, functional variant, or domain thereof) is utilized in a system (e.g., a Gene Writer™ system) described in WO2021178720 or WO2023039424, the entire contents of each of which are incorporated herein by reference for all purposes.

### 4.5.5.3 Nucleobase Editor Editing Systems

[0347] Provided herein are, inter alia, nucleobase editor-based systems (e.g., for use in editing target nucleic acid molecules, e.g., in cells, e.g., within a subject). In some embodiments, the system comprises (a) (i) a fusion protein comprising a Cas endonuclease described herein (or a functional fragment or functional variant thereof) (e.g., described herein) and a nucleobase editor (or a functional fragment or functional variant thereof) (e.g., described herein) (see, e.g., § 4.3.1.2); (ii) a nucleic acid molecule encoding (a)(i) (e.g., a nucleic acid molecule described herein); (iii) a vector comprising (a)(ii) (e.g., a vector described herein); (iv) a carrier comprising any one of (a)(i)-(a)(iii) (e.g., a carrier described herein); or (v) a composition comprising any one of (a)(i)-(a)(iv) (e.g., a composition (e.g., a pharmaceutical composition) described herein); and (b) (i) a first gRNA comprising (i-a) a crRNA and a tracrRNA, wherein the crRNA and a tracrRNA are one separate nucleic acid molecules or (i-b) a sgRNA; (ii) one or more DNA molecule encoding (b) (i); (iii) a vector comprising (b)(i) or (b)(ii) (e.g., a vector described herein); (iv) a carrier comprising any one of (b)(i)-(b)(iii) (e.g., a carrier described herein); or (v) a composition comprising any one of (b)(i)-(b)(iv) (e.g., a composition (e.g., a pharmaceutical composition) described herein).

[0348] Without wishing to be bound by theory, the nucleobase editor based editing system can be utilized e.g., in methods of editing a target nucleic acid molecule (e.g., methods described herein), wherein the gRNA (e.g., sgRNA) nucleic acid binds to a target nucleic acid molecule (e.g., a double stranded nucleic acid molecule (e.g., a dsDNA molecule) and binds to the fusion protein to thereby localize the fusion protein to the target nucleic acid molecule. Subsequently the endonuclease (e.g., nickase) of the fusion protein cleaves the target nucleic acid molecule (e.g., a single strand of a target double stranded nucleic acid molecule (e.g., a dsDNA molecule)) allowing the nucleobase editor (e.g., deaminase) to edit one more nucleobase in the nucleotide sequence of the target nucleic acid molecule (e.g., in a single strand of a target double stranded nucleic acid molecule (e.g., a dsDNA molecule) (i.e., the edited strand)). See, e.g., WO2021050571A1; WO2022/204268; WO2019079347A1, the entire contents of each of which is incorporated herein by reference for all purposes.

[0349] In some embodiments, the Cas endonuclease (a) has the ability to mediate single strand breaks in a target double stranded nucleic acid (e.g., DNA) molecule; (b) is not able to mediate double strand breaks in a target double stranded nucleic acid (e.g., DNA) molecule; (c) has the ability to mediate single strand breaks in a target double stranded nucleic acid (e.g., DNA) molecule and is not able to mediate double strand breaks in a target double stranded nucleic acid (e.g., DNA) molecule (i.e., nickase activity); and/or (d) has RNA guided DNA endonuclease activity; or any combination of the foregoing.

[0350] In some embodiments, the target nucleic acid molecule of the system is a double stranded nucleic acid (e.g., dsDNA) molecule, wherein one strand of the double stranded nucleic acid (e.g., dsDNA) molecule is targeted for editing. In some embodiments, the system further comprises a gRNA (e.g., sgRNA) that is capable of directing the endonuclease (e.g., described herein) of the system to form a single strand break (i.e., a nick) in the non-edited strand of a target double stranded nucleic acid (e.g., dsDNA) molecule. Without wishing to be bound by theory it is thought that the nicking of the non-edited strand of a target double stranded nucleic acid molecule (e.g., a target dsDNA molecule) induces preferential replacement of the edited strand. In some embodiments, at least a portion of the nucleotide sequence of the gRNA (e.g., sgRNA) is complementary to a portion of the nucleotide sequence of the edited strand (as defined herein) of the target double stranded nucleic acid (e.g., dsDNA) molecule. In some embodiments, at least a portion of the nucleotide sequence of the second gRNA (e.g., sgRNA) binds to a portion of the nucleotide sequence of the edited strand (as defined herein) of a double stranded nucleic acid (e.g., dsDNA) molecule. In some embodiments, the gRNA is a sgRNA. In some embodiments, the gRNA (e.g., sgRNA) is present on the same nucleic acid molecule as the template gRNA (or the nucleic acid (e.g., DNA) molecule encoding the gRNA is present on the same nucleic acid (e.g., DNA) molecule encoding the template gRNA). In some embodiments, the gRNA (e.g., sgRNA) is present on a different nucleic acid molecule as the template gRNA (or the nucleic acid (e.g., DNA) molecule encoding the gRNA is present on a different nucleic acid (e.g., DNA) molecule encoding the template gRNA).

### 4.6 Nucleic Acid Molecules

[0351] Further provided herein are nucleic acid (e.g., DNA, RNA) molecules encoding any protein described herein (e.g., a Cas endonuclease (or a functional fragment, functional variant, or domain thereof), a heterologous protein (e.g., a reverse transcriptase, a nucleobase editor), a fusion protein, a conjugate, or any RNA molecule described herein (e.g., a gRNA (e.g., a sgRNA, a template RNA)). Nucleic acid molecules described herein can be generated using common methods known in the art (e.g., chemical synthesis).

[0352] In some embodiments, the nucleic acid molecule is DNA. In some embodiments, the nucleic acid molecule is RNA (e.g., mRNA or circular RNA). In some embodiments, the nucleic acid (e.g., RNA) molecule is a translatable RNA. In some embodiments, the nucleic acid molecule is single stranded. In some embodiments the nucleic acid molecule is double stranded. In some embodiments, the nucleic acid molecule is a single stranded RNA molecule. In some embodiments, the nucleic acid molecule is a single stranded DNA molecule. In some embodiments, the nucleic acid molecule is a double stranded RNA molecule. In some embodiments, the nucleic acid molecule is a double stranded DNA molecule.

[0353] In some embodiments, the nucleic acid molecule is a linear coding nucleic acid construct. In some embodiments, the nucleic acid molecule is contained within a vector (e.g., a plasmid, a viral vector). In some embodiments, the nucleic acid molecule is contained within a non-viral vector. In some embodiments, the nucleic acid molecule is contained within a plasmid. In some embodiments, the nucleic acid molecule is contained within a viral vector. A more detailed description of vectors (e.g., non-viral (e.g., plasmids) and viral) for both RNA and DNA nucleic acids is provided in § 4.7.

[0354] In some embodiments, the nucleic acid molecule may be modified (compared to the sequence of a reference nucleic acid molecule), e.g., to impart one or more of (a) improved resistance to in vivo degradation, (b) improved stability in vivo, (c) reduced secondary structures, and/or (d) improved translatability in vivo, compared to the reference nucleic acid sequence. Alterations include, without limitation, e.g., codon optimization, nucleotide variation (see, e.g., description below), etc. Modifications are known in the art and described herein (see, e.g., § 4.5.2.2).

[0355] In some embodiments, the nucleotide sequence of the nucleic acid molecule is codon optimized, e.g., for expression. In some embodiments, may be used to match codon frequencies in target and host organisms to ensure proper folding; bias guanosine (G) and/or cytosine (C) content to increase nucleic acid stability; minimize tandem repeat codons or base runs that may impair gene construction or expression; customize transcriptional and translational control regions; insert or remove protein trafficking sequences; remove/add post translation alteration sites in encoded protein (e.g. glycosylation sites); add, remove, or shuffle protein domains; insert or delete restriction sites; modify ribosome binding sites and mRNA degradation sites; adjust translational rates to allow the various domains of the protein to fold properly; or to reduce or eliminate problem secondary structures within the polynucleotide. In some embodiments, the codon optimized nucleic acid sequence shows one or more of the above (compared to a reference nucleic acid sequence). In some embodiments, the codon optimized nucleic acid sequence shows one or more of improved resistance to in vivo degradation, improved stability in vivo, reduced secondary structures, and/or improved translatability in vivo, compared to a reference nucleic acid sequence. Codon optimization methods, tools, algorithms, and services are known in the art, non-limiting examples include services from GeneArt (Life Technologies) and DNA2.0 (Menlo Park Calif.). In some embodiments, the open reading frame (ORF) sequence is optimized using optimization algorithms. In some embodiments, the nucleic acid sequence is modified to optimize the number of G and/or C nucleotides as compared to a reference nucleic acid sequence. An increase in the number of G and C nucleotides may be generated by substitution of codons containing adenosine (T) or thymidine (T) (or uracil (U)) nucleotides by codons containing G or C nucleotides.

### 4.7 Vectors

[0356] In some embodiments, a nucleic acid (DNA, RNA) molecule described herein is contained in a vector (e.g., a non-viral vector (e.g., a plasmid), a viral vector). As such, provided herein are vectors (e.g., non-viral vectors (e.g., plasmids) viral vectors) comprising one or more nucleic acid molecule described herein (e.g., nucleic acid molecules encoding any protein described herein (e.g., a Cas endonuclease (or a functional fragment, functional variant, or domain thereof), a heterologous protein (e.g., a reverse transcriptase, a nucleobase editor), a fusion protein, a conjugate, etc.) or any RNA molecule described herein (e.g., a gRNA (e.g., a sgRNA, a template RNA)) (e.g., see, e.g., § 4.6) are provided. Such vectors can be easily manipulated by methods well known to the ordinary person of skill in the art. The vector used can be any vector that is suitable for cloning nucleic acid molecules that can be used for transcription of the nucleic acid molecule of interest.

[0357] In some embodiments, the vector is a plasmid. A person of ordinary skill in the art is aware of suitable plasmids for expression of the DNA of interest. For example, plasmid DNA may be generated to allow efficient production of the encoded endonucleases in cell lines, e.g., in insect cell lines, for example using vectors as described in WO2009150222A2 and as defined in PCT claims 1 to 33, the disclosure relating to claim 1 to 33 of WO2009150222A2 the entire contents of which is incorporated by reference herein for all purposes.

[0358] In some embodiments, the vector is a viral vector. Viral vectors include both RNA and DNA based vectors. The vectors can be designed to meet a variety of specifications. For example, viral vectors can be engineered to be capable or incapable of replication in prokaryotic and/or eukaryotic cells. In some embodiments, the vector is replication deficient. In some embodiments, the vector is replication competent. Vectors can be engineered or selected that either will (or will not) integrate in whole or in part into the genome of host cells, resulting (or not (e.g., episomal expression)) in stable host cells comprising the desired nucleic acid in their genome.

[0359] Exemplary viral vectors include, but are not limited to, adenovirus vectors, adeno-associated virus vectors, lentivirus vectors, retrovirus vectors, poxvirus vectors, parapoxivirus vectors, vaccinia virus vectors, fowlpox virus vectors, herpes virus vectors, adeno-associated virus vectors, alphavirus vectors, lentivirus vectors, rhabdovirus vectors, measles virus, Newcastle disease virus vectors, picornaviruses vectors, or lymphocytic choriomeningitis virus vectors. In some embodiments, the viral vector is an adenovirus vector, adeno-associated virus vector, lentivirus vector, anellovector (as described, for example, in U.S. Pat. No. 11,446,344, the entire contents of which is incorporated by reference herein for all purposes).

[0360] In some embodiments, the vector is an adenoviral vector (e.g., human adenoviral vector, e.g., HAdV or AdHu). In some embodiments, the adenovirus vector has the E1 region deleted, rendering it replication-deficient in human cells. Other regions of the adenovirus such as E3 and E4 may also be deleted. Exemplary adenovirus vectors include, but are not limited to, those described in e.g., WO2005071093 or WQ2006048215, the entire contents of each of which is incorporated by reference herein for all purposes. Exemplary, simian adenovirus vectors include AdCh63 (see, e.g., WO2005071093, the entire contents of which is incorporated by reference herein for all purposes) or AdCh68.

[0361] Viral vectors can be generated with a packaging/producer cell line (e.g., a mammalian cell line) using standard methods known to the person of ordinary skill in the art. Generally, a nucleic acid construct (e.g., a plasmid) encoding the transgene (e.g., a Cas endonuclease described herein) (along with additional elements e.g., a promoter, inverted terminal repeats (ITRs) flanking the transgene, a plasmid encoding e.g., viral replication and structural proteins, along with one or more helper plasmids a host cell (e.g., a host cell line) are transfected into a host cell line (i.e., the packing/producer cell line). In some instances, depending on the viral vector, a helper plasmid may also be needed that include helper genes from another virus (e.g., in the instance of adeno-associated viral vectors). Eukaryotic expression plasmids are commercially available from a variety of suppliers, for example the plasmid series: pcDNA™, pCR3.1™, pCMV™, pFRT™ pVAX1™, pCI™, Nanoplasmid™, and Pcaggs. The person of ordinary skill in the art is aware of numerous transfection methods and any suitable method of transfection may be employed (e.g., using a biochemical substance as carrier (e.g., lipofectamine), by mechanical means, or by electroporation,). The cells are cultured under conditions suitable and for a sufficient time for plasmid expression. The viral particles may be purified from the cell culture medium using standard methods known to the person of ordinary skill in the art. For example, by centrifugation followed by e.g., chromatography or ultrafiltration.

### 4.8 Carriers

[0362] In some embodiments, a Cas endonuclease (or a functional fragment, functional variant, or domain thereof) described herein (see, e.g., § 4.2), a fusion protein described herein (see, e.g., § 4.3); a conjugate described herein (see, e.g., § 4.3; a system described herein (see, e.g., § 4.5) (or any one or more component thereof); a nucleic acid molecule described herein (see, e.g., § 4.6); a vector described herein (see, e.g., § 4.7); a cell described herein (see, e.g., § 4.9); a reaction mixture described herein (see, e.g., § 4.10), or a pharmaceutical composition described herein (see, e.g., § 4.11) is formulated within one or more carrier.

[0363] As such, the disclosure provides, inter alia, carriers comprising any one or more of the following: a Cas endonuclease (or a functional fragment, functional variant, or domain thereof) described herein (see, e.g., § 4.2), a fusion protein described herein (see, e.g., § 4.3); a conjugate described herein (see, e.g., § 4.3); a system described herein (see, e.g., § 4.5) (or any one or more component thereof); a nucleic acid molecule described herein (see, e.g., § 4.6); a vector described herein (see, e.g., § 4.7); a cell described herein (see, e.g., § 4.9); areaction mixture described herein (see, e.g., § 4.10), or a pharmaceutical composition described herein (see, e.g., § 4.11).

[0364] Any of the foregoing (e.g., proteins, nucleic acid molecules, vectors, etc.) can be encapsulated within a carrier, chemically conjugated to a carrier, associated with the carrier. In this context, the term “associated” refers to the essentially stable combination of any one of the foregoing, e.g., a protein, nucleic acid molecule, etc., with one or more molecules of a carrier (e.g., one or more lipids of a lipid-based carrier, e.g., an LNP, liposome, lipoplex, and/or nanoliposome) into larger complexes or assemblies without covalent binding. In this context, the term “encapsulation” refers to the incorporation of any one of the foregoing, e.g., a protein, a nucleic acid molecule, etc.) into a carrier (e.g., a lipid-based carrier, e.g., an LNP, liposome, lipoplex, and/or nanoliposome) wherein the molecule (e.g., the protein, nucleic acid molecule, etc.) is entirely contained within the interior space of the carrier (e.g., the lipid-based carrier, e.g., the LNP, liposome, lipoplex, and/or nanoliposome).

[0365] Exemplary carriers include, but are not limited to, lipid-based carriers (e.g., lipid nanoparticles (LNPs), liposomes, lipoplexes, and nanoliposomes). In some embodiments, the carrier is a lipid-based carrier. In some embodiments, the carrier is an LNP. In some embodiments, the LNP comprises a cationic lipid, a neutral lipid, a cholesterol, and/or a PEG lipid. Lipid based carriers are further described below in § 4.8.1.

### 4.8.1 Lipid Based Carriers

[0366] In some embodiments, a Cas endonuclease (or a functional fragment, functional variant, or domain thereof) described herein (see, e.g., § 4.2), a fusion protein described herein (see, e.g., § 4.3); a conjugate described herein (see, e.g., § 4.3); a system described herein (see, e.g., § 4.5) (or any one or more component thereof); a nucleic acid molecule described herein (see, e.g., § 4.6); a vector described herein (see, e.g., § 4.7); a cell described herein (see, e.g., § 4.9); a reaction mixture described herein (see, e.g., § 4.10), or a pharmaceutical composition described herein (see, e.g., § 4.11) is encapsulated or associated with one or more lipids (e.g., cationic lipids and/or neutral lipids), thereby forming lipid-based carriers such as lipid nanoparticles (LNPs), liposomes, lipoplexes, or nanoliposomes.

[0367] In some embodiments, any of the foregoing molecules (e.g., proteins, nucleic acid molecules, vectors, systems, etc.) is encapsulated in one or more lipids (e.g., cationic lipids and/or neutral lipids), thereby forming lipid-based carriers such as lipid nanoparticles (LNPs), liposomes, lipoplexes, or nanoliposomes. In some embodiments, the molecule (e.g., the protein, nucleic acid molecule, vector, system, etc.) is associated with one or more lipids (e.g., cationic lipids and/or neutral lipids), thereby forming lipid-based carriers such as lipid nanoparticles (LNPs), liposomes, lipoplexes, or nanoliposomes. In some embodiments, the molecule (e.g., the protein, nucleic acid molecule, vector, system, etc.) is encapsulated in LNPs (e.g., as described herein). The use of LNPs for mRNA delivery is further detailed in e.g., Hou X et al. Lipid nanoparticles for mRNA delivery. Nat Rev Mater. 2021; 6(12):1078-1094. doi: 10.1038/s41578-021-00358-0. Epub 2021 Aug. 10. PMID: 34394960; PMCID: PMC8353930, the entire contents of each of which are incorporated by reference herein for all purposes.

[0368] The molecules (e.g., the proteins, nucleic acid molecules, vectors, systems, etc.) described herein may be completely or partially located in the interior space of the LNPs, liposomes, lipoplexes, and/or nanoliposomes, within the lipid layer/membrane, or associated with the exterior surface of the lipid layer/membrane. One purpose of incorporating the molecule (e.g., the protein, nucleic acid molecule, vector, system, etc.) into LNPs, liposomes, lipoplexes, and/or nanoliposomes is to protect the molecule (e.g., the protein, nucleic acid molecule, vector, system, etc.) from an environment which may contain enzymes or chemicals or conditions that degrade the molecule (e.g., the protein, nucleic acid molecule, vector, system, etc.) from molecules or conditions that cause the rapid excretion of the molecule (e.g., the protein, nucleic acid molecule, vector, system, etc.). Moreover, incorporating the molecules (e.g., the proteins, nucleic acid molecules, vectors, systems, etc.) into LNPs, liposomes, lipoplexes, and/or nanoliposomes may promote the uptake of the molecules (e.g., the proteins, nucleic acid molecules, vectors, systems, etc.), and hence, may enhance the therapeutic effect of the proteins or nucleic acid molecules (e.g., RNA, e.g., mRNA). Accordingly, incorporating a molecule (e.g., protein, nucleic acid molecule, vector, system, etc.), into LNPs, liposomes, lipoplexes, and/or nanoliposomes may be particularly suitable for a pharmaceutical composition described herein, e.g., for intramuscular and/or intradermal administration.

[0369] In some embodiments, molecules (e.g., the proteins, nucleic acid molecules, vectors, systems, etc.) described herein are formulated into a lipid-based carrier (or lipid nanoformulation). In some embodiments, the lipid-based carrier (or lipid nanoformulation) is a liposome or a lipid nanoparticle (LNP). In one embodiment, the lipid-based carrier is an LNP.

[0370] In some embodiments, the lipid-based carrier (or lipid nanoformulation) comprises a cationic lipid (e.g., an ionizable lipid), a non-cationic lipid (e.g., phospholipid), a structural lipid (e.g., cholesterol), and a PEG-modified lipid. In some embodiments, the lipid-based carrier (or lipid nanoformulation) contains one or more molecules described herein (e.g., a protein, a nucleic acid molecule, a vector, a system, etc. described herein), or a pharmaceutically acceptable salt thereof.

[0371] As described herein, suitable compounds to be used in the lipid-based carrier (or lipid nanoformulation) include all the isomers and isotopes of the compounds described above, as well as all the pharmaceutically acceptable salts, solvates, or hydrates thereof, and all crystal forms, crystal form mixtures, and anhydrides or hydrates.

[0372] In addition to one or more molecules (e.g., the proteins, nucleic acid molecules, vectors, systems, etc.) described herein, the lipid-based carrier (or lipid nanoformulation) may further include a second lipid. In some embodiments, the second lipid is a cationic lipid, a non-cationic (e.g., neutral, anionic, or zwitterionic) lipid, or an ionizable lipid.

[0373] One or more naturally occurring and/or synthetic lipid compounds may be used in the preparation of the lipid-based carrier (or lipid nanoformulation).

[0374] The lipid-based carrier (or lipid nanoformulation) may contain positively charged (cationic) lipids, neutral lipids, negatively charged (anionic) lipids, or a combination thereof.

### 4.8.1.1 Cationic Lipids (Positively Charged) and Ionizable Lipids

[0375] In some embodiments, the lipid-based carrier (or lipid nanoformulation) comprises one or more cationic lipids, e.g., a cationic lipid that can exist in a positively charged or neutral form depending on pH, or an amine-containing lipid that can be readily protonated. In some embodiments, the cationic lipid is a lipid capable of being positively charged, e.g., under physiological conditions.

[0376] Exemplary cationic lipids include one or more amine group(s) which bear the positive charge. Examples of positively charged (cationic) lipids include, but are not limited to, N,N′-dimethyl-N,N′-dioctacyl ammonium bromide (DDAB) and chloride DDAC), N-(1-(2,3-dioleyloxy)propyl)-N,N,N-trimethylammonium chloride (DOTMA), 3β-[N—(N′,N′-dimethylaminoethyl)carbamoyl) cholesterol (DC-chol), 1,2-dioleoyloxy-3-[trimethylammonio]-propane (DOTAP), 1,2-dioctadecyloxy-3-[trimethylammonio]-propane (DSTAP), and 1,2-dioleoyloxypropyl-3-dimethyl-hydroxy ethyl ammonium chloride (DORI), N,N-dioleyl-N,N-dimethylammonium chloride (DODAC), N,N-dimethyl-2,3-dioleyloxy)propylamine (DODMA), 1,2-Dioleoyl-3-Dimethylammonium-propane (DODAP), 1,2-Dioleoylcarbamyl-3-Dimethylammonium-propane (DOCDAP), 1,2-Dilineoyl-3-Dimethylammonium-propane (DLINDAP), 3-Dimethylamino-2-(Cholest-5-en-3-beta-oxybutan-4-oxy)-1-(cis,cis-9,12-octadecadienoxy)propane (CLinDMA), 2-[5′-(cholest-5-en-3-beta-oxy)-3′-oxapentoxy)-3-dimethyl-1-(cis, cis-9′,12′-octadecadienoxy)propane (CpLin DMA), N,N-Dimethyl-3,4-dioleyloxybenzylamine (DMOBA), and the cationic lipids described in e.g. Martin et al., Current Pharmaceutical Design, pages 1-394, the entire contents of which are incorporated by reference herein for all purposes. In some embodiments, the lipid-based carrier (or lipid nanoformulation) comprises more than one cationic lipid.

[0377] In some embodiments, the lipid-based carrier (or lipid nanoformulation) comprises a cationic lipid having an effective pKa over 6.0. In some embodiments, the lipid-based carrier (or lipid nanoformulation) further comprises a second cationic lipid having a different effective pKa (e.g., greater than the first effective pKa) than the first cationic lipid.

[0378] In some embodiments, cationic lipids that can be used in the lipid-based carrier (or lipid nanoformulation) include, for example those described in Table 4 of WO 2019/217941, the entire contents of which are incorporated by reference herein for all purposes.

[0379] In some embodiments, the cationic lipid is an ionizable lipid (e.g., a lipid that is protonated at low pH, but that remains neutral at physiological pH). In some embodiments, the lipid-based carrier (or lipid nanoformulation) may comprise one or more additional ionizable lipids, different than the ionizable lipids described herein. Exemplary ionizable lipids include, but are not limited to,

[chemical structure]

(see WO2017004143A1, the entire contents of which is incorporated herein by reference for all purposes).

[0380] In some embodiments, the lipid-based carrier (or lipid nanoformulation) further comprises one or more compounds described by WO 2021/113777 (e.g., a lipid of Formula (3) such as a lipid of Table 3 of WO 2021/113777), the entire contents of which are incorporated by reference herein for all purposes.

[0381] In one embodiment, the ionizable lipid is a lipid disclosed in Hou, X., et al. Nat Rev Mater 6, 1078-1094 (2021). https://doi.org/10.1038/s41578-021-00358-0 (e.g., L319, C12-200, and DLin-MC3-DMA), (the entire contents of which are incorporated by reference herein for all purposes).

[0382] Examples of other ionizable lipids that can be used in lipid-based carrier (or lipid nanoformulation) include, without limitation, one or more of the following formulas: X of US 2016/0311759; I of US 20150376115 or in US 2016/0376224; Compound 5 or Compound 6 in US 2016/0376224; I, IA, or II of U.S. Pat. No. 9,867,888; I, II or III of US 2016/0151284; I, IA, II, or IIA of US 2017/0210967; I-c of US 2015/0140070; A of US 2013/0178541; I of US 2013/0303587 or US 2013/0123338; I of US 2015/0141678; II, III, IV, or V of US 2015/0239926; I of US 2017/0119904; I or II of WO 2017/117528; A of US 2012/0149894; A of US 2015/0057373; A of WO 2013/116126; A of US 2013/0090372; A of US 2013/0274523; A of US 2013/0274504; A of US 2013/0053572; A of WO 2013/016058; A of WO 2012/162210; I of US 2008/042973; I, II, III, or IV of US 2012/01287670; I or II of US 2014/0200257; I, II, or III of US 2015/0203446; I or III of US 2015/0005363; I, IA, IB, IC, ID, II, IIA, IIB, IIC, IID, or III-XXIV of US 2014/0308304; of US 2013/0338210; I, II, III, or IV of WO 2009/132131; A of US 2012/01011478; I or XXXV of US 2012/0027796; XIV or XVII of US 2012/0058144; of US 2013/0323269; I of US 2011/0117125; I, II, or III of US 2011/0256175; I, II, III, IV, V, VI, VII, VIII, IX, X, XI, XII of US 2012/0202871; I, II, III, IV, V, VI, VII, VIII, X, XII, XIII, XIV, XV, or XVI of US 2011/0076335; I or II of US 2006/008378; I of WO2015/074085 (e.g., ATX-002); I of US 2013/0123338; I or X-A-Y—Z of US 2015/0064242; XVI, XVII, or XVIII of US 2013/0022649; I, II, or III of US 2013/0116307; I, II, or III of US 2013/0116307; I or II of US 2010/0062967; I-X of US 2013/0189351; I of US 2014/0039032; V of US 2018/0028664; I of US 2016/0317458; I of US 2013/0195920; 5, 6, or 10 of U.S. Pat. No. 10,221,127; 111-3 of WO 2018/081480; I-5 or I-8 of WO 2020/081938; I of WO 2015/199952 (e.g., compound 6 or 22) and Table 1 therein; 18 or 25 of U.S. Pat. No. 9,867,888; A of US 2019/0136231; II of WO 2020/219876; 1 of US 2012/0027803; OF-02 of US 2019/0240349; 23 of U.S. Pat. No. 10,086,013; cKK-E12/A6 of Miao et al (2020); C12-200 of WO 2010/053572; 7C1 of Dahlman et al (2017); 304-013 or 503-013 of Whitehead et al; TS-P4C2 of U.S. Pat. No. 9,708,628; I of WO 2020/106946; I of WO 2020/106946; (1), (2), (3), or (4) of WO 2021/113777; and any one of Tables 1-16 of WO 2021/113777, the entire contents of each of which are incorporated by reference herein for all purposes.

[0383] In some embodiments, the lipid-based carrier (or lipid nanoformulation) further includes biodegradable ionizable lipids, for instance, (9Z,12Z)-3-((4,4-bis(octyloxy)butanoyl)oxy)-2-((((3-(diethylamino)propoxy)carbonyl)oxy)methyl)propyl octadeca-9,12-dienoate, also called 3-((4,4-bis(octyloxy)butanoyl)oxy)-2-((((3-(diethylamino)propoxy)carbonyl)oxy)methyl)propyl (9Z,12Z)-octadeca-9,12-dienoate). See, e.g., lipids of WO 2019/067992, WO 2017/173054, WO 2015/095340, and WO 2014/136086, the entire contents of each of which are incorporated by reference herein for all purposes.

### 4.8.1.2 Non-Cationic Lipids (e.g., Phospholipids)

[0384] In some embodiments, the lipid-based carrier (or lipid nanoformulation) further comprises one or more non-cationic lipids. In some embodiments, the non-cationic lipid is a phospholipid. In some embodiments, the non-cationic lipid is a phospholipid substitute or replacement. In some embodiments, the non-cationic lipid is a negatively charged (anionic) lipid.

[0385] Exemplary non-cationic lipids include, but are not limited to, distearoyl-sn-glycero-phosphoethanolamine, distearoylphosphatidylcholine (DSPC), dioleoylphosphatidylcholine (DOPC), dipalmitoylphosphatidylcholine (DPPC), dioleoylphosphatidylglycerol (DOPG), dipalmitoylphosphatidylglycerol (DPPG), dioleoyl-phosphatidylethanolamine (DOPE), palmitoyloleoylphosphatidylcholine (POPC), palmitoyloleoylphosphatidylethanolamine (POPE), dioleoyl-phosphatidylethanolamine 4-(N-maleimidomethyl)-cyclohexane-1-carboxylate (DOPE-mal), dipalmitoyl phosphatidyl ethanolamine (DPPE), dimyristoylphosphoethanolamine (DMPE), distearoyl-phosphatidyl-ethanolamine (DSPE), monomethyl-phosphatidylethanolamine (such as 16-O-monomethyl PE), dimethyl-phosphatidylethanolamine (such as 16-O-dimethyl PE), 18-1-trans PE, 1-stearoyl-2-oleoyl-phosphatidyethanolamine (SOPE), hydrogenated soy phosphatidylcholine (HSPC), egg phosphatidylcholine (EPC), dioleoylphosphatidylserine (DOPS), sphingomyelin (SM), dimyristoyl phosphatidylcholine (DMPC), dimyristoyl phosphatidylglycerol (DMPG), distearoylphosphatidylglycerol (DSPG), dierucoylphosphatidylcholine (DEPC), palmitoyloleyolphosphatidylglycerol (POPG), dielaidoyl-phosphatidylethanolamine (DEPE), 1,2-dilauroyl-sn-glycero-3-phosphocholine (DLPC), Sodium 1,2-ditetradecanoyl-sn-glycero-3-phosphate (DMPA), phosphatidylcholine (lecithin), phosphatidylethanolamine, lysolecithin, lysophosphatidylethanolamine, phosphatidylserine, phosphatidylinositol, sphingomyelin, egg sphingomyelin (ESM), phosphatidylethanolamine (cephalin), cardiolipin, phosphatidic acid, cerebrosides, dicetylphosphate, lysophosphatidylcholine, dilinoleoylphosphatidylcholine, or mixtures thereof. It is understood that other diacylphosphatidylcholine and diacylphosphatidylethanolamine phospholipids can also be used. The acyl groups in these lipids are preferably acyl groups derived from fatty acids having C₁₀-C₂₄ carbon chains, e.g., lauroyl, myristoyl, paimitoyl, stearoyl, or oleoyl. Additional exemplary lipids, in certain embodiments, include, without limitation, those described in Kim et al. (2020) dx.doi.org/10.1021/acs.nanolett.0c01386, the entire contents of which are incorporated by reference herein for all purposes. Such lipids include, in some embodiments, plant lipids found to improve liver transfection with mRNA (e.g., DGTS).

[0386] In some embodiments, the lipid-based carrier (or lipid nanoformulation) may comprise a combination of distearoylphosphatidylcholine/cholesterol, dipalmitoylphosphatidylcholine/cholesterol, dimyrystoylphosphatidylcholine/cholesterol, 1,2-Dioleoyl-sn-glycero-3-phosphocholine (DOPC)/cholesterol, or egg sphingomyelin/cholesterol.

[0387] Other examples of suitable non-cationic lipids include, without limitation, nonphosphorous lipids such as, e.g., stearylamine, dodecylamine, hexadecylamine, acetyl palmitate, glycerol ricinoleate, hexadecyl stearate, isopropyl myristate, amphoteric acrylic polymers, triethanolamine-lauryl sulfate, alkyl-aryl sulfate polyethyloxylated fatty acid amides, dioctadecyl dimethyl ammonium bromide, ceramide, sphingomyelin, and the like. Other non-cationic lipids are described in WO 2017/099823 or US 2018/0028664, the entire contents of each of which are incorporated by reference herein for all purposes.

[0388] In one embodiment, the lipid-based carrier (or lipid nanoformulation) further comprises one or more non-cationic lipid that is oleic acid or a compound of Formula I, II, or IV of US 2018/0028664, the entire contents of which are incorporated by reference herein for all purposes.

[0389] The non-cationic lipid content can be, for example, 0-30% (mol) of the total lipid components present. In some embodiments, the non-cationic lipid content is 5-20% (mol) or 10-15% (mol) of the total lipid components present.

[0390] In some embodiments, the lipid-based carrier (or lipid nanoformulation) further comprises a neutral lipid, and the molar ratio of an ionizable lipid to a neutral lipid ranges from about 2:1 to about 8:1 (e.g., about 2:1, 3:1, 4:1, 5:1, 6:1, 7:1, or 8:1).

[0391] In some embodiments, the lipid-based carrier (or lipid nanoformulation) does not include any phospholipids.

[0392] In some embodiments, the lipid-based carrier (or lipid nanoformulation) can further include one or more phospholipids, and optionally one or more additional molecules of similar molecular shape and dimensions having both a hydrophobic moiety and a hydrophilic moiety (e.g., cholesterol).

### 4.8.1.3 Structural Lipids

[0393] The lipid-based carrier (or lipid nanoformulation) described herein may further comprise one or more structural lipids. As used herein, the term “structural lipid” refers to sterols (e.g., cholesterol) and also to lipids containing sterol moieties.

[0394] Incorporation of structural lipids in the lipid nanoparticle may help mitigate aggregation of other lipid in the particle. Structural lipids can be selected from the group including but not limited to, cholesterol or cholesterol derivative, fecosterol, sitosterol, ergosterol, campesterol, stigmasterol, brassicasterol, tomatidine, tomatine, ursolic acid, alpha-tocopherol, hopanoids, phytosterols, steroids, and mixtures thereof. In some embodiments, the structural lipid is a sterol. In certain embodiments, the structural lipid is a steroid. In certain embodiments, the structural lipid is cholesterol. In certain embodiments, the structural lipid is an analog of cholesterol. In certain embodiments, the structural lipid is alpha-tocopherol.

[0395] In some embodiments, structural lipids may be incorporated into the lipid-based carrier at molar ratios ranging from about 0.1 to 1.0 (cholesterol phospholipid).

[0396] In some embodiments, sterols, when present, can include one or more of cholesterol or cholesterol derivatives, such as those described in WO 2009/127060 or US 2010/0130588, the entire contents of each of which are incorporated by reference herein for all purposes. Additional exemplary sterols include phytosterols, including those described in Eygeris et al. (2020), Nano Lett. 2020; 20(6):4543-4549, the entire contents of which are incorporated by reference herein for all purposes.

[0397] In some embodiments, the structural lipid is a cholesterol derivative. Non-limiting examples of cholesterol derivatives include polar analogues such as 5a-cholestanol, 53-coprostanol, cholesteryl-(2′-hydroxy)-ethyl ether, cholesteryl-(4′-hydroxy)-butyl ether, and 6-ketocholestanol; non-polar analogues such as 5a-cholestane, cholestenone, 5a-cholestanone, 5p-cholestanone, and cholesteryl decanoate; and mixtures thereof. In some embodiments, the cholesterol derivative is a polar analogue, e.g., cholesteryl-(4′-hydroxy)-butyl ether. Exemplary cholesterol derivatives are described in WO 2009/127060 and US 2010/0130588, the entire contents of each of which are incorporated by reference herein for all purposes.

[0398] In some embodiments, the lipid-based carrier (or lipid nanoformulation) further comprises sterol in an amount of 0-50 mol % (e.g., 0-10 mol %, 10-20 mol %, 20-50 mol %, 20-30 mol %, 30-40 mol %, or 40-50 mol %) of the total lipid components.

### 4.8.1.4 Polymers and Polyethylene Glycol (PEG)—Lipids

[0399] In some embodiments, the lipid-based carrier (or lipid nanoformulation) may include one or more polymers or co-polymers, e.g., poly(lactic-co-glycolic acid) (PFAG) nanoparticles.

[0400] In some embodiments, the lipid-based carrier (or lipid nanoformulation) may include one or more polyethylene glycol (PEG) lipid. Examples of useful PEG-lipids include, but are not limited to, 1,2-Diacyl-sn-Glycero-3-Phosphoethanolamine-N-[Methoxy(Polyethylene glycol)-350](mPEG 350 PE); 1,2-Diacyl-sn-Glycero-3-Phosphoethanolamine-N-[Methoxy(Polyethylene glycol)-550](mPEG 550 PE); 1,2-Diacyl-sn-Glycero-3-Phosphoethanolamine-N-[Methoxy(Polyethylene glycol)-750](mPEG 750 PE); 1,2-Diacyl-sn-Glycero-3-Phosphoethanolamine-N-[Methoxy(Polyethylene glycol)-1000](mPEG 1000 PE); 1,2-Diacyl-sn-Glycero-3-Phosphoethanolamine-N-[Methoxy(Polyethylene glycol)-2000](mPEG 2000 PE); 1,2-Diacyl-sn-Glycero-3-Phosphoethanolamine-N-[Methoxy(Polyethylene glycol)-3000](mPEG 3000 PE); 1,2-Diacyl-sn-Glycero-3-Phosphoethanolamine-N-[Methoxy(Polyethylene glycol)-5000](mPEG 5000 PE); N-Acyl-Sphingosine-1-[Succinyl(Methoxy Polyethylene Glycol) 750](mPEG 750 Ceramide); N-Acyl-Sphingosine-1-[Succinyl(Methoxy Polyethylene Glycol) 2000](mPEG 2000 Ceramide); and N-Acyl-Sphingosine-1-[Succinyl(Methoxy Polyethylene Glycol) 5000](mPEG 5000 Ceramide). In some embodiments, the PEG lipid is a polyethyleneglycol-diacylglycerol (i.e., polyethyleneglycol diacylglycerol (PEG-DAG), PEG-cholesterol, or PEG-DMB) conjugate.

[0401] In some embodiments, the lipid-based carrier (or nanoformulation) includes one or more conjugated lipids (such as PEG-conjugated lipids or lipids conjugated to polymers described in Table 5 of WO 2019/217941, the entire contents of which are incorporated by reference herein for all purposes). In some embodiments, the one or more conjugated lipids is formulated with one or more ionic lipids (e.g., non-cationic lipid such as a neutral or anionic, or zwitterionic lipid); and one or more sterols (e.g., cholesterol).

[0402] The PEG conjugate can comprise a PEG-dilaurylglycerol (C12), a PEG-dimyristylglycerol (C14), a PEG-dipalmitoylglycerol (C16), a PEG-disterylglycerol (C18), PEG-dilaurylglycamide (C12), PEG-dimyristylglycamide (C14), PEG-dipalmitoylglycamide (C16), and PEG-disterylglycamide (C18).

[0403] In some embodiments, conjugated lipids, when present, can include one or more of PEG-diacylglycerol (DAG) (such as 1-(monomethoxy-polyethyleneglycol)-2,3-dimyristoylglycerol (PEG-DMG)), PEG-dialkyloxypropyl (DAA), PEG-phospholipid, PEG-ceramide (Cer), a pegylated phosphatidylethanoloamine (PEG-PE), PEG succinate diacylglycerol (PEGS-DAG) (such as 4-0-(2′,3′-di(tetradecanoyloxy)propyl-1-0-(w-methoxy(polyethoxy)ethyl) butanedioate (PEG-S-DMG)), PEG dialkoxypropylcarbam, N-(carbonyl-methoxypolyethylene glycol 2000)-1,2-distearoyl-sn-glycero-3-phosphoethanolamine sodium salt, and those described in Table 2 of WO 2019/051289 (the entire contents of which are incorporated by reference herein for all purposes), and combinations of the foregoing.

[0404] Additional exemplary PEG-lipid conjugates are described, for example, in U.S. Pat. Nos. 5,885,613, 6,287,591, US 2003/0077829, US 2003/0077829, US 2005/0175682, US 2008/0020058, US 2011/0117125, US 2010/0130588, US 2016/0376224, US 2017/0119904, US 2018/0028664, and WO 2017/099823, the entire contents of each of which are incorporated by reference herein for all purposes.

[0405] In some embodiments, the PEG-lipid is a compound of Formula III, III-a-I, III-a-2, III-b-1, III-b-2, or V of US 2018/0028664, which is incorporated herein by reference in its entirety. In some embodiments, the PEG-lipid is of Formula II of US 2015/0376115 or US 2016/0376224, the entire contents of each of which are incorporated by reference herein for all purposes. In some embodiments, the PEG-DAA conjugate can be, for example, PEG-dilauryloxypropyl, PEG-dimyristyloxypropyl, PEG-dipalmityloxypropyl, or PEG-distearyloxypropyl. In some embodiments, the PEG-lipid includes one of the following:

[chemical structure]

[0406] In some embodiments, lipids conjugated with a molecule other than a PEG can also be used in place of PEG-lipid. For example, polyoxazoline (POZ)-lipid conjugates, polyamide-lipid conjugates (such as ATTA-lipid conjugates), and cationic-polymer lipid (GPL) conjugates can be used in place of or in addition to the PEG-lipid.

[0407] Exemplary conjugated lipids, e.g., PEG-lipids, (POZ)-lipid conjugates, ATTA-lipid conjugates and cationic polymer-lipids, include those described in Table 2 of WO 2019/051289A9, the entire contents of which are incorporated by reference herein for all purposes.

[0408] In some embodiments, the conjugated lipid (e.g., the PEGylated lipid) can be present in an amount of 0-20 mol % of the total lipid components present in the lipid-based carrier (or lipid nanoformulation). In some embodiments, the conjugated lipid (e.g., the PEGylated lipid) content is 0.5-10 mol % or 2-5 mol % of the total lipid components.

[0409] When needed, the lipid-based carrier (or lipid nanoformulation) described herein may be coated with a polymer layer to enhance stability in vivo (e.g., sterically stabilized LNPs).

[0410] Examples of suitable polymers include, but are not limited to, poly(ethylene glycol), which may form a hydrophilic surface layer that improves the circulation half-life of liposomes and enhances the amount of lipid nanoformulations (e.g., liposomes or LNPs) that reach therapeutic targets. See, e.g., Working et al. J Pharmacol Exp Ther, 289: 1128-1133 (1999); Gabizon et al., J Controlled Release 53: 275-279 (1998); Adlakha Hutcheon et al., Nat Biotechnol 17: 775-779 (1999); and Koning et al., Biochim Biophys Acta 1420: 153-167 (1999), the entire contents of each of which are incorporated by reference herein for all purposes.

### 4.8.1.5 Percentages of Lipid Nanoformulation Components

[0411] In some embodiments, the lipid-based carrier (or lipid nanoformulation) comprises one of more of the molecules described herein (e.g., a protein, a nucleic acid molecule, a vector, a system, etc. described herein), optionally a non-cationic lipid (e.g., a phospholipid), a sterol, a neutral lipid, and optionally conjugated lipid (e.g., a PEGylated lipid) that inhibits aggregation of particles. In some embodiments, the lipid-based carrier (or lipid nanoformulation) further comprises a payload (e.g., a molecule described herein (e.g., a protein, a nucleic acid molecule, a vector, a system, etc. described herein)). The amounts of these components can be varied independently and to achieve desired properties. For example, in some embodiments, the ionizable lipid including the lipid compounds described herein is present in an amount from about 20 mol % to about 100 mol % (e.g., 20-90 mol %, 20-80 mol %, 20-70 mol %, 25-100 mol %, 30-70 mol %, 30-60 mol %, 30-40 mol %, 40-50 mol %, or 50-90 mol %) of the total lipid components; a non-cationic lipid (e.g., phospholipid) is present in an amount from about 0 mol % to about 50 mol % (e.g., 0-40 mol %, 0-30 mol %, 5-50 mol %, 5-40 mol %, 5-30 mol %, or 5-10 mol %) of the total lipid components, a conjugated lipid (e.g., a PEGylated lipid) in an amount from about 0.5 mol % to about 20 mol % (e.g., 1-10 mol % or 5-10%) of the total lipid components, and a sterol in an amount from about 0 mol % to about 60 mol % (e.g., 0-50 mol %, 10-60 mol %, 10-50 mol %, 15-60 mol %, 15-50 mol %, 20-50 mol %, 20-40 mol %) of the total lipid components, provided that the total mol % of the lipid component does not exceed 100%.

[0412] In some embodiments, the lipid-based carrier (or lipid nanoformulation) comprises about 25-100 mol % of the ionizable lipid including the lipid compounds described herein, about 0-50 mol % phospholipid, about 0-50 mol % sterol, and about 0-10 mol % PEGylated lipid.

[0413] In some embodiments, the lipid-based carrier comprises a payload (e.g., a molecule described herein (e.g., a protein, a nucleic acid molecule, a vector, a system, etc. described herein)) that is formulated in a lipid nanoparticle, wherein the lipid nanoparticle comprises about 25-100 mol % of the ionizable lipid including the lipid compounds described herein, about 0-50 mol % phospholipid, about 0-50 mol % sterol, and about 0-10 mol % PEGylated lipid. In some embodiments, the encapsulation efficiency of the payload may be at least 70%.

[0414] In one embodiment, the lipid-based carrier (or lipid nanoformulation) comprises about 25-100 mol % of the ionizable lipid including the lipid compounds described herein; about 0-40 mol % phospholipid (e.g., DSPC), about 0-50 mol % sterol (e.g., cholesterol), and about 0-10 mol % PEGylated lipid.

[0415] In some embodiments, the lipid-based carrier comprises a payload (e.g., a molecule described herein (e.g., a protein, a nucleic acid molecule, a vector, a system, etc. described herein)) that is formulated in a lipid nanoparticle, wherein the lipid nanoparticle comprises about 25-100 mol % of the ionizable lipid including the lipid compounds described herein; about 0-40 mol % phospholipid (e.g., DSPC), about 0-50 mol % sterol (e.g., cholesterol), and about 0-10 mol % PEGylated lipid. In some embodiments, the encapsulation efficiency of the payload may be at least 70%.

[0416] In some embodiments, the lipid-based carrier (or lipid nanoformulation) comprises about 30-60 mol % (e.g., about 35-55 mol %, or about 40-50 mol %) of the ionizable lipid including the lipid compounds described herein, about 0-30 mol % (e.g., 5-25 mol %, or 10-20 mol %) phospholipid, about 15-50 mol % (e.g., 18.5-48.5 mol %, or 30-40 mol %) sterol, and about 0-10 mol % (e.g., 1-5 mol %, or 1.5-2.5 mol %) PEGylated lipid.

[0417] In some embodiments, the lipid-based carrier comprises a payload (e.g., a molecule described herein (e.g., a protein, a nucleic acid molecule, a vector, a system, etc. described herein)) that is formulated in a lipid nanoparticle, wherein the lipid nanoparticle comprises about 30-60 mol % (e.g., about 35-55 mol %, or about 40-50 mol %) of the ionizable lipid including the lipid compounds described herein, about 0-30 mol % (e.g., 5-25 mol %, or 10-20 mol %) phospholipid, about 15-50 mol % (e.g., 18.5-48.5 mol %, or 30-40 mol %) sterol, and about 0-10 mol % (e.g., 1-5 mol %, or 1.5-2.5 mol %) PEGylated lipid. In some embodiments, the encapsulation efficiency of the payload may be at least 70%.

[0418] In some embodiments, molar ratios of ionizable lipid/sterol/phospholipid (or another structural lipid)/PEG-lipid/additional components is varied in the following ranges: ionizable lipid (25-100%); phospholipid (DSPC) (0-40%); sterol (0-50%); and PEG lipid (0-5%).

[0419] In some embodiments, the lipid-based carrier comprises a payload (e.g., a molecule described herein (e.g., a protein, a nucleic acid molecule, a vector, a system, etc. described herein)) that is formulated in a lipid nanoparticle, wherein the lipid nanoparticle comprises molar ratios of ionizable lipid/sterol/phospholipid (or another structural lipid)/PEG-lipid/additional components in the following ranges: ionizable lipid (25-100%); phospholipid (DSPC) (0-40%); sterol (0-50%); and PEG lipid (0-5%). In some embodiments, the encapsulation efficiency of the payload may be at least 70%.

[0420] In some embodiments, the lipid-based carrier (or lipid nanoformulation) comprises, by mol % or wt % of the total lipid components, 50-75% ionizable lipid (including the lipid compound as described herein), 20-40% sterol (e.g., cholesterol or derivative), 0 to 10% non-cationic-lipid, and 1-10% conjugated lipid (e.g., the PEGylated lipid).

[0421] In some embodiments, the lipid-based carrier comprises a payload (e.g., a molecule described herein (e.g., a protein, a nucleic acid molecule, a vector, a system, etc. described herein)) that is formulated in a lipid nanoparticle, wherein the lipid nanoparticle comprises, by mol % or wt % of the total lipid components, 50-75% ionizable lipid (including the lipid compound as described herein), 20-40% sterol (e.g., cholesterol or derivative), 0 to 10% non-cationic-lipid, and 1-10% conjugated lipid (e.g., the PEGylated lipid). In some embodiments, the encapsulation efficiency of the payload may be at least 70%.

[0422] In some embodiments, the lipid-based carrier (or lipid nanoformulation) comprises (i) a molecule described herein (e.g., a protein, a nucleic acid molecule, a vector, a system, etc. described herein); (ii) a cationic lipid comprising from 50 mol % to 65 mol % of the total lipid present in the lipid-based carrier; (iii) a non-cationic lipid comprising a mixture of a phospholipid and a cholesterol derivative thereof, wherein the phospholipid comprises from 3 mol % to 15 mol % of the total lipid present in the lipid-based carrier and the cholesterol or derivative thereof comprises from 30 mol % to 40 mol % of the total lipid present in the lipid-based carrier; and (iv) a conjugated lipid comprising 0.5 mol % to 2 mol % of the total lipid present in the particle.

[0423] In some embodiments, the lipid-based carrier (or lipid nanoformulation) comprises (i) a molecule described herein (e.g., a protein, a nucleic acid molecule, a vector, a system, etc. described herein); (ii) a cationic lipid comprising from 50 mol % to 85 mol % of the total lipid present in the lipid-based carrier; (iii) a non-cationic lipid comprising from 13 mol % to 49.5 mol % of the total lipid present in the lipid-based carrier; and (d) a conjugated lipid comprising from 0.5 mol % to 2 mol % of the total lipid present in the lipid-based carrier.

[0424] In some embodiments, the phospholipid component in the mixture may be present from 2 mol % to 20 mol %, from 2 mol % to 15 mol %, from 2 mol % to 12 mol %, from 4 mol % to 15 mol %, from 4 mol % to 10 mol %, from 5 mol % to 10 mol %, (or any fraction of these ranges) of the total lipid components. In some embodiments, the lipid-based carrier (or lipid nanoformulation) is phospholipid-free.

[0425] In some embodiments, the sterol component (e.g. cholesterol or derivative) in the mixture may comprise from 25 mol % to 45 mol %, from 25 mol % to 40 mol %, from 25 mol % to 35 mol %, from 25 mol % to 30 mol %, from 30 mol % to 45 mol %, from 30 mol % to 40 mol %, from 30 mol % to 35 mol %, from 35 mol % to 40 mol %, from 27 mol % to 37 mol %, or from 27 mol % to 35 mol % (or any fraction of these ranges) of the total lipid components.

[0426] In some embodiments, the non-ionizable lipid components in the lipid-based carrier (or lipid nanoformulation) may be present from 5 mol % to 90 mol %, from 10 mol % to 85 mol %, or from 20 mol % to 80 mol % (or any fraction of these ranges) of the total lipid components.

[0427] The ratio of total lipid components to the payload (e.g., an encapsulated therapeutic agent such as a molecule described herein (e.g., a protein, a nucleic acid molecule, a vector, a system, etc. described herein) can be varied as desired. For example, the total lipid components to the payload (mass or weight) ratio can be from about 10:1 to about 30:1. In some embodiments, the total lipid components to the payload ratio (mass/mass ratio; w/w ratio) can be in the range of from about 1:1 to about 25:1, from about 10:1 to about 14:1, from about 3:1 to about 15:1, from about 4:1 to about 10:1, from about 5:1 to about 9:1, or about 6:1 to about 9:1. The amounts of total lipid components and the payload can be adjusted to provide a desired N/P ratio, for example, N/P ratio of 3, 4, 5, 6, 7, 8, 9, 10, 11, 12, 13, 14, 15, 16, 17, 18, 19, 20, 21, 22, 23, 24, 25, 26, 27, 28, 29, 30, or higher. Generally, the lipid-based carrier (or lipid nanoformulation's) overall lipid content can range from about 5 mg/ml to about 30 mg/mL. Nitrogen:phosphate ratios (N:P ratio) is evaluated at values between 0.1 and 100.

[0428] The efficiency of encapsulation of a payload such as a protein and/or nucleic acid, describes the amount of protein and/or nucleic acid that is encapsulated or otherwise associated with a lipid nanoformulation (e.g., liposome or LNP) after preparation, relative to the initial amount provided. The encapsulation efficiency is desirably high (e.g., at least 70%, 80%. 90%, 95%, close to 100%). The encapsulation efficiency may be measured, for example, by comparing the amount of protein or nucleic acid in a solution containing the liposome or LNP before and after breaking up the liposome or LNP with one or more organic solvents or detergents. An anion exchange resin may be used to measure the amount of free protein or nucleic acid (e.g., RNA) in a solution. Fluorescence may be used to measure the amount of free protein and/or nucleic acid (e.g., RNA) in a solution. For the lipid-based carrier (or lipid nanoformulation) described herein, the encapsulation efficiency of a protein and/or nucleic acid may be at least 50%, for example 50%, 55%, 60%, 65%, 70%, 75%, 80%, 85%, 90%, 91%, 92%, 93%, 94%, 95%, 96%, 97%, 98%, 99%, or 100%. In some embodiments, the encapsulation efficiency may be at least 70%. In some embodiments, the encapsulation efficiency may be at least 80%. In some embodiments, the encapsulation efficiency may be at least 90%. In some embodiments, the encapsulation efficiency may be at least 95%.

### 4.9 Cells

[0429] The disclosure provides, inter alia, cells (e.g., host cells) comprising any one or more of a Cas endonuclease (or a functional fragment, functional variant, or domain thereof) described herein (see, e.g., § 4.2), a fusion protein described herein (see, e.g., § 4.3); a conjugate described herein (see, e.g., § 4.3); a system described herein (see, e.g., § 4.5) (or any one or more component thereof); a nucleic acid molecule described herein (see, e.g., § 4.6); a vector described herein (see, e.g., § 4.7); a reaction mixture described herein (see, e.g., § 4.10), a carrier described herein (see, e.g., § 4.8); or a pharmaceutical composition described herein (see, e.g., § 4.11).

[0430] In some embodiments, the cell is a eukaryotic cell. In some embodiments, the cell is mammalian cell. In some embodiments, the cell is an animal cell. In some embodiments, the cell is a human cell. In some embodiments, the cell is in vitro. In some embodiments, the cell is in vivo. In some embodiments, the cell is ex vivo.

[0431] Standard methods known in the art can be utilized to deliver any one of the foregoing (e.g., endonuclease, fusion protein, system, vector, carrier, etc.) in a cell (e.g., a host cell). Standard methods known in the art can be utilized to culture cells (e.g., host cells) in vitro or ex vivo.

### 4.10 Reaction Mixtures

[0432] The disclosure provides, inter alia, reaction mixtures comprising any one or more of a Cas endonuclease (or a functional fragment, functional variant, or domain thereof) described herein (see, e.g., § 4.2), a fusion protein described herein (see, e.g., § 4.3); a conjugate described herein (see, e.g., § 4.3); a system described herein (see, e.g., § 4.5) (or any one or more component thereof); a nucleic acid molecule described herein (see, e.g., § 4.6); a vector described herein (see, e.g., § 4.7); a carrier described herein (see, e.g., § 4.8); or a pharmaceutical composition described herein (see, e.g., § 4.11).

[0433] In some embodiments, the reaction mixture comprises a target nucleic acid molecule (e.g., described herein). In some embodiments, the target nucleic acid molecule comprises a DNA molecule. In some embodiments, the target nucleic acid molecule comprises a dsDNA molecule. In some embodiments, the target nucleic acid molecule is a gene or genome. In some embodiments, the target nucleic acid molecule (e.g., a target DNA molecule (e.g., a target gene or genome)) is within a cell. In some embodiments, the cell is in vitro, ex vivo, or in vivo. In some embodiments the cells is a eukaryotic cell (e.g., a mammalian cell, an animal cell, a primate cell, a non-human primate cell, a human cell). In some embodiments, the cell is a human cell.

### 4.11 Pharmaceutical Compositions

[0434] The disclosure provides, inter alia, pharmaceutical compositions comprising any one or more of a Cas endonuclease (or a functional fragment, functional variant, or domain thereof) described herein (see, e.g., § 4.2), a fusion protein described herein (see, e.g., § 4.3); a conjugate described herein (see, e.g., § 4.3); a system described herein (see, e.g., § 4.5) (or any one or more component thereof); a nucleic acid molecule described herein (see, e.g., § 4.6); a vector described herein (see, e.g., § 4.7); a reaction mixture described herein (see, e.g., § 4.10); a carrier described herein (see, e.g., § 4.8); and a pharmaceutically acceptable excipient (see, e.g., Remington's Pharmaceutical Sciences (1990) Mack Publishing Co., Easton, PA, the entire contents of which is incorporated by reference herein for all purposes).

[0435] The disclosure provides, inter alia, methods of making pharmaceutical compositions described herein comprising any one or more of a Cas endonuclease (or a functional fragment, functional variant, or domain thereof) described herein (see, e.g., § 4.2), a fusion protein described herein (see, e.g., § 4.3); a conjugate described herein (see, e.g., § 4.3); a system described herein (see, e.g., § 4.5) (or any one or more component thereof); a nucleic acid molecule described herein (see, e.g., § 4.6); a vector described herein (see, e.g., § 4.7); a reaction mixture described herein (see, e.g., § 4.10); a carrier described herein (see, e.g., § 4.8); and formulating it into a pharmaceutically acceptable composition by the addition of one or more pharmaceutically acceptable excipient.

[0436] Also provided herein are pharmaceutical compositions comprising any one or more of a Cas endonuclease (or a functional fragment, functional variant, or domain thereof) described herein (see, e.g., § 4.2), a fusion protein described herein (see, e.g., § 4.3); a conjugate described herein (see, e.g., § 4.3); a system described herein (see, e.g., § 4.5) (or any one or more component thereof); a nucleic acid molecule described herein (see, e.g., § 4.6); a vector described herein (see, e.g., § 4.7); a reaction mixture described herein (see, e.g., § 4.10); a carrier described herein (see, e.g., § 4.8), wherein the pharmaceutical composition lacks a predetermined threshold amount or a detectable amount of a process impurity or contaminant, e.g., lacks a predetermined threshold amount or a detectable amount of a process-related impurity such as host cell proteins, host cell DNA, or a cell culture component (e.g., inducers, antibiotics, or media components); a product-related impurity (e.g., precursors, fragments, aggregates, degradation products); or a contaminant, e.g., endotoxin, bacteria, viral contaminant.

[0437] A pharmaceutical composition described herein may be formulated for any route of administration to a subject. Non-limiting embodiments include parenteral administration, such as intramuscular, intradermal, subcutaneous, transcutaneous, or mucosal administration. In some embodiments, the pharmaceutical composition is formulated for administration by intramuscular, intradermal, or subcutaneous injection. In some embodiments, the pharmaceutical composition is formulated for administration by intramuscular injection. In some embodiments, the pharmaceutical composition is formulated for administration by intradermal injection. In some embodiments, the pharmaceutical composition is formulated for administration by subcutaneous injection. Injectables can be prepared in conventional forms, either as liquid solutions or suspensions. The injectables can contain one or more excipients. Exemplary excipients include, for example, water, saline, dextrose, glycerol or ethanol. In addition, if desired, the pharmaceutical compositions to be administered can also contain minor amounts of non-toxic auxiliary substances such as wetting or emulsifying agents, pH buffering agents, stabilizers, solubility enhancers, or other such agents, such as for example, sodium acetate, sorbitan monolaurate, triethanolamine oleate or cyclodextrins. In some embodiments, the pharmaceutical composition is formulated in a single dose. In some embodiments, the pharmaceutical compositions is formulated as a multi-dose.

[0438] Acceptable excipients (e.g., carriers and stabilizers) compatible for inclusion in pharmaceutical compositions described herein are preferably nontoxic to recipients at the dosages and concentrations employed, and include buffers such as phosphate, citrate, or other organic acids; antioxidants including ascorbic acid or methionine; preservatives (such as octadecyldimethylbenzyl ammonium chloride; hexamethonium chloride; benzalkonium chloride, benzethonium chloride; phenol, butyl or benzyl alcohol; alkyl parabens such as methyl or propyl paraben; catechol; resorcinol; cyclohexanol; 3-pentanol; or m-cresol); low molecular weight (less than about 10 residues) polypeptides; proteins, such as serum albumin, gelatin, or immunoglobulins; hydrophilic polymers such as polyvinylpyrrolidone; amino acids such as glycine, glutamine, asparagine, histidine, arginine, or lysine; monosaccharides, disaccharides, or other carbohydrates including glucose, mannose, or dextrins; chelating agents such as EDTA; sugars such as sucrose, mannitol, trehalose or sorbitol; salt-forming counter-ions such as sodium; metal complexes (e.g., Zn-protein complexes); and/or non-ionic surfactants such as TWEEN™ PLURONICS™ or polyethylene glycol (PEG). Pharmaceutically acceptable excipients further include for example, aqueous vehicles, nonaqueous vehicles, antimicrobial agents, isotonic agents, buffers, antioxidants, local anesthetics, suspending and dispersing agents, emulsifying agents, sequestering or chelating agents or other pharmaceutically acceptable substances. Examples of aqueous vehicles, which can be incorporated in one or more of the formulations described herein, include sodium chloride injection, Ringer's injection, isotonic dextrose injection, sterile water injection, dextrose or lactated Ringer's injection. Nonaqueous parenteral vehicles, which can be incorporated in one or more of the formulations described herein, include fixed oils of vegetable origin, cottonseed oil, corn oil, sesame oil or peanut oil. Antimicrobial agents in bacteriostatic or fungistatic concentrations can be added to the parenteral preparations described herein and packaged in multiple-dose containers, which include phenols or cresols, mercurials, benzyl alcohol, chlorobutanol, methyl and propyl p-hydroxybenzoic acid esters, thimerosal, benzalkonium chloride or benzethonium chloride. Isotonic agents, which can be incorporated in one or more of the formulations described herein, include sodium chloride or dextrose. Buffers, which can be incorporated in one or more of the formulations described herein, include phosphate or citrate. Antioxidants, which can be incorporated in one or more of the formulations described herein, include sodium bisulfate. Local anesthetics, which can be incorporated in one or more of the formulations described herein, include procaine hydrochloride. Suspending and dispersing agents, which can be incorporated in one or more of the formulations described herein, include sodium carboxymethylcelluose, hydroxypropyl methylcellulose or polyvinylpyrrolidone. Emulsifying agents, which can be incorporated in one or more of the formulations described herein, include Polysorbate 80 (TWEEN® 80). A sequestering or chelating agent of metal ions, which can be incorporated in one or more of the formulations described herein, is EDTA. Pharmaceutical carriers, which can be incorporated in one or more of the formulations described herein, also include ethyl alcohol, polyethylene glycol or propylene glycol for water miscible vehicles; or sodium hydroxide, hydrochloric acid, citric acid or lactic acid for pH adjustment.

[0439] In some embodiments, a precise dose to be employed in a pharmaceutical composition (e.g., described herein) will also depend on the route of administration, and the seriousness of the condition caused by it, and should be decided according to the judgment of the practitioner and each subject's circumstances. For example, effective doses may also vary depending upon means of administration, target site, physiological state of the subject (including age, body weight, and health), other medications administered, or whether therapy is prophylactic or therapeutic. Therapeutic dosages are preferably titrated to optimize safety and efficacy.

### 4.12 Kits

[0440] The disclosure provides, inter alia, kits comprising any one or more of a Cas endonuclease (or a functional fragment, functional variant, or domain thereof) described herein (see, e.g., § 4.2), a fusion protein described herein (see, e.g., § 4.3); a conjugate described herein (see, e.g., § 4.3); a system described herein (see, e.g., § 4.5) (or any one or more component thereof); a nucleic acid molecule described herein (see, e.g., § 4.6); a vector described herein (see, e.g., § 4.7); a reaction mixture described herein (see, e.g., § 4.10); a carrier described herein (see, e.g., § 4.8); and/or a pharmaceutical composition described herein (see, e.g., § 4.11).

[0441] In addition, a kit may comprise a liquid vehicle for solubilizing or diluting, and/or technical instructions. The technical instructions of the kit may contain information about administration and dosage and subject groups.

[0442] In some embodiments, the endonuclease (or a functional fragment, functional variant, or domain thereof) described herein, the fusion protein described herein; the conjugate described herein; the system described herein (or any one or more component thereof); the nucleic acid molecule described herein; the vector described herein; the reaction mixture described herein; the carrier described herein; and/or the pharmaceutical composition described herein is provided in a separate part of the kit. In some embodiments, the endonuclease (or a functional fragment, functional variant, or domain thereof) described herein, the fusion protein described herein; the conjugate described herein; the system described herein (or any one or more component thereof); the nucleic acid molecule described herein; the vector described herein; the reaction mixture described herein; the carrier described herein; and/or the pharmaceutical composition described herein is optionally lyophilized, spray-dried, or spray-freeze dried. The kit may further contain as a part a vehicle (e.g., buffer solution) for solubilizing the dried or lyophilized endonuclease (or a functional fragment, functional variant, or domain thereof) described herein, fusion protein described herein; conjugate described herein; system described herein (or any one or more component thereof); nucleic acid molecule described herein; vector described herein; reaction mixture described herein; carrier described herein; and/or pharmaceutical composition described herein.

[0443] In some embodiments, a kit comprises a single dose container. In some embodiments, the kit comprises a multi-dose container. In some embodiments, the kit comprises an administration device (e.g., an injector for intradermal injection or a syringe for intramuscular injection).

[0444] Any of the kits described herein may be used in any of the methods described herein (see, e.g., § 4.13).

### 4.13 Methods of Use

[0445] The disclosure provides, inter alia, various methods of utilizing any one or more of a Cas endonuclease (or a functional fragment, functional variant, or domain thereof) described herein (see, e.g., § 4.2), a fusion protein described herein (see, e.g., § 4.3); a conjugate described herein (see, e.g., § 4.3); a system described herein (see, e.g., § 4.5) (or any one or more component thereof); a nucleic acid molecule described herein (see, e.g., § 4.6); a vector described herein (see, e.g., § 4.7); a reaction mixture described herein (see, e.g., § 4.10); a carrier described herein (see, e.g., § 4.8); a pharmaceutical composition described herein (see, e.g., § 4.11); and/or a kit described herein (see, e.g., § 4.12).

[0446] In some embodiments, methods described herein comprise delivering, contacting, or introducing any one or more of the foregoing into a cell. Exemplary cells include, but are not limited to, e.g., eukaryotic cells, prokaryotic cells, animal cells, mammalian cells, primate cells, non-human primate cells, and human cells. In some embodiments, the cell is a eukaryotic cell, e.g., a cell of a multicellular organism, e.g., an animal, e.g., a mammal (e.g., human, swine, bovine) a bird (e.g., poultry, such as chicken, turkey, or duck), or a fish. In some embodiments, the cell is a non-human animal cell (e.g., a laboratory animal, a livestock animal, or a companion animal). In some embodiments, the cell is a stem cell (e.g., a hematopoietic stem cell), a fibroblast, or a T cell. In some embodiments, the cell is a non-dividing cell, e.g., a nondividing fibroblast or non-dividing T cell. In some embodiments, the cell is a eukaryotic cell (e.g., a mammalian cell, an animal cell, a primate cell, a non-human primate cell, a human cell). In some embodiments, the cell is a human cell. In some embodiments, the cell is a plant cell. In some embodiments, the cell is euploid, is not immortalized, is part of a tissue, is part of an organism, is a primary cell, is non-dividing, is haploid (e.g., a germline cell), is a non-cancerous polyploid cell, or is from a subject having a genetic disease. In some embodiments, the cell is in vitro, ex vivo, in vivo. In some embodiments, the cell is within a subject. In some embodiments, the subject described herein. In some embodiments, the subject is a mammal, animal, non-human primate, primate, human, or plant. In some embodiments, the subject is a human. In some embodiments, the cell is subsequently administered to a subject (e.g., for a therapeutic application (e.g., described herein (e.g., gene therapy))).

[0447] In some embodiments, methods described herein comprise administering any one or more of the foregoing to a subject. Exemplary subjects include, but are not limited to, e.g., mammals, e.g., humans, non-human mammals, e.g., non-human primates. In some embodiments, the subject is a human. In some embodiments, the subject is a vertebrate animal (e.g., mammal, bird, fish, reptile, or amphibian). In some embodiments, the subject is a non-human mammal such as a non-human primate (e.g., monkeys, apes), ungulate (e.g., cattle, buffalo, sheep, goat, pig, camel, llama, alpaca, deer, horses, donkeys), carnivore (e.g., dog, cat), rodent (e.g., rat, mouse), or lagomorph (e.g., rabbit). In some embodiments, the subject is a bird, such as a member of the avian taxa Galliformes (e.g., chickens, turkeys, pheasants, quail), Anseriformes (e.g., ducks, geese), Paleaognathae (e.g., ostriches, emus), Columbiformes (e.g., pigeons, doves), or Psittaciformes (e.g., parrots).

[0448] The dosage of any of the foregoing, to be administered to a subject in accordance with any of the methods described herein can be determined in accordance with standard techniques known to those of ordinary skill in the art, including the route of administration, the age and weight of the subject.

### 4.13.1 Methods of Delivery

[0449] In one aspect, provided herein are methods of delivering any one or more of a Cas endonuclease (or a functional fragment, functional variant, or domain thereof), a fusion protein; a conjugate; a system (or any one or more component thereof); a nucleic acid molecule; a vector; a reaction mixture; a carrier; and/or pharmaceutical composition to a cell, the method comprising contacting a cell or introducing into a cell a Cas endonuclease (or a functional fragment, functional variant, or domain thereof) described herein (see, e.g., § 4.2), a fusion protein described herein (see, e.g., § 4.3); a conjugate described herein (see, e.g., § 4.3); a system described herein (see, e.g., § 4.5) (or any one or more component thereof); a nucleic acid molecule described herein (see, e.g., § 4.6); a vector described herein (see, e.g., § 4.7); a reaction mixture described herein (see, e.g., § 4.10); a carrier described herein (see, e.g., § 4.8); and/or pharmaceutical composition described herein (see, e.g., § 4.11), to thereby deliver the endonuclease (or a functional fragment, functional variant, or domain thereof), the fusion protein; the conjugate; the system (or any one or more component thereof); the nucleic acid molecule; the vector; the reaction mixture; the carrier; and/or the pharmaceutical composition to the cell. In some embodiments, the endonuclease (or a functional fragment, functional variant, or domain thereof), the fusion protein; the conjugate; the system (or any one or more component thereof); the nucleic acid molecule; the vector; the reaction mixture; the carrier; and/or the pharmaceutical composition is contacted to the cell or introduced into the cell in an amount and for a period of time sufficient to deliver the endonuclease (or a functional fragment, functional variant, or domain thereof), the fusion protein; the conjugate; the system (or any one or more component thereof); the nucleic acid molecule; the vector; the reaction mixture; the carrier; and/or the pharmaceutical composition to the cell.

[0450] In some embodiments, the cell is a eukaryotic cell, e.g., a cell of a multicellular organism, e.g., an animal, e.g., a mammal (e.g., human, swine, bovine) a bird (e.g., poultry, such as chicken, turkey, or duck), or a fish. In some embodiments, the cell is a non-human animal cell (e.g., a laboratory animal, a livestock animal, or a companion animal). In some embodiments, the cell is a stem cell (e.g., a hematopoietic stem cell), a fibroblast, or a T cell. In some embodiments, the cell is a non-dividing cell, e.g., a nondividing fibroblast or non-dividing T cell. In some embodiments, the cell is a eukaryotic cell (e.g., a mammalian cell, an animal cell, a primate cell, a non-human primate cell, a human cell). In some embodiments, the cell is a human cell. In some embodiments, the cell is a plant cell. In some embodiments, the cell is euploid, is not immortalized, is part of a tissue, is part of an organism, is a primary cell, is non-dividing, is haploid (e.g., a germline cell), is a non-cancerous polyploid cell, or is from a subject having a genetic disease.

[0451] In some embodiments, the cell is in vitro, ex vivo, in vivo. In some embodiments, the cell is within a subject. In some embodiments, the subject is a mammal, animal, non-human primate, primate, human, or plant. In some embodiments, the subject is a human. In some embodiments, the cell is subsequently administered to a subject (e.g., for a therapeutic application (e.g., described herein (e.g., gene therapy))).

[0452] In one aspect, provided herein are methods of delivering any one or more of a Cas endonuclease (or a functional fragment, functional variant, or domain thereof), a fusion protein; a conjugate; a system (or any one or more component thereof); a nucleic acid molecule; a vector; a reaction mixture; a carrier; and/or pharmaceutical composition to a subject, the method comprising administering to the subject a Cas endonuclease (or a functional fragment, functional variant, or domain thereof) described herein (see, e.g., § 4.2), a fusion protein described herein (see, e.g., § 4.3); a conjugate described herein (see, e.g., § 4.3); a system described herein (see, e.g., § 4.5) (or any one or more component thereof); a nucleic acid molecule described herein (see, e.g., § 4.6); a vector described herein (see, e.g., § 4.7); a reaction mixture described herein (see, e.g., § 4.10); a carrier described herein (see, e.g., § 4.8); and/or pharmaceutical composition described herein (see, e.g., § 4.11), to thereby deliver the endonuclease (or a functional fragment, functional variant, or domain thereof), the fusion protein; the conjugate; the system (or any one or more component thereof); the nucleic acid molecule; the vector; the reaction mixture; the carrier; and/or the pharmaceutical composition to the cell. In some embodiments, the endonuclease (or a functional fragment, functional variant, or domain thereof), the fusion protein; the conjugate; the system (or any one or more component thereof); the nucleic acid molecule; the vector; the reaction mixture; the carrier; and/or the pharmaceutical composition is administered to the subject in an amount and for a period of time sufficient to deliver the endonuclease (or a functional fragment, functional variant, or domain thereof), the fusion protein; the conjugate; the system (or any one or more component thereof); the nucleic acid molecule; the vector; the reaction mixture; the carrier; and/or the pharmaceutical composition to the subject. In some embodiments, the subject is a mammal, animal, non-human primate, primate, human, or plant. In some embodiments, the subject is a human.

### 4.13.2 Methods of Cleaving a Target Nucleic Acid Molecule

[0453] In one aspect, provided herein are methods of cleaving a target site in a target nucleic acid (e.g., DNA) molecule (e.g., a double stranded target nucleic acid sequence (e.g., dsDNA, (e.g., genomic dsDNA))), the method comprising contacting the target nucleic acid (e.g., DNA) molecule (e.g., a double stranded target nucleic acid sequence (e.g., dsDNA, (e.g., genomic dsDNA)) with any one or more of a Cas endonuclease (or a functional fragment, functional variant, or domain thereof) described herein (see, e.g., § 4.2), a fusion protein described herein (see, e.g., § 4.3); a conjugate described herein (see, e.g., § 4.3); a system described herein (see, e.g., § 4.5) (or any one or more component thereof); a nucleic acid molecule described herein (see, e.g., § 4.6); a vector described herein (see, e.g., § 4.7); a reaction mixture described herein (see, e.g., § 4.10); a carrier described herein (see, e.g., § 4.8); and/or pharmaceutical composition described herein (see, e.g., § 4.11), to thereby cleave the target site in the target nucleic acid (e.g., DNA) molecule (e.g., a double stranded target nucleic acid sequence (e.g., dsDNA, (e.g., genomic dsDNA)). In some embodiments, the method comprises contacting the target nucleic acid (e.g., DNA) molecule (e.g., a double stranded target nucleic acid sequence (e.g., dsDNA, (e.g., genomic dsDNA)) with the endonuclease (or a functional fragment, functional variant, or domain thereof), the fusion protein; the conjugate; the system (or any one or more component thereof); the nucleic acid molecule; the vector; the reaction mixture; the carrier; and/or the pharmaceutical composition in an amount and for a period of time sufficient to cleave the target site in the target stranded target nucleic acid sequence (e.g., dsDNA, (e.g., genomic dsDNA))).

[0454] In some embodiments, the target nucleic acid molecule is a nucleic acid molecule described herein (see, e.g., § 4.5.1). In some embodiments, the target nucleic acid molecule is a DNA molecule. In some embodiments, the target nucleic acid molecule is a dsDNA molecule. In some embodiments, the target nucleic acid molecule is within a cell (e.g., within the genome (e.g., a gene) of a cell (e.g., a eukaryotic cell) in vitro, ex vivo, or in vivo). In some embodiments, the target nucleic acid molecule is a gene (e.g., within a cell (e.g., a eukaryotic cell) (e.g., within a subject (e.g., a human subject)). In some embodiments, the target nucleic acid molecule is a gene within a cell (e.g., a eukaryotic cell) (e.g., within a subject (e.g., a human subject)). In some embodiments, the target nucleic acid molecule is a gene within a cell (e.g., a eukaryotic cell) within a subject (e.g., a human subject). In some embodiments, the target nucleic acid molecule is genomic DNA or RNA. In some embodiments, the target nucleic acid molecule is within the genome of cell (e.g., a eukaryotic cell) (e.g., within a subject (e.g., a human subject)). In some embodiments, the target nucleic acid molecule is within a cell (e.g., within the genome (e.g., a gene) of a cell (e.g., a eukaryotic cell)) within a subject (e.g., a human subject).

[0455] In one aspect, provided herein are a Cas endonuclease (or a functional fragment, functional variant, or domain thereof) described herein (see, e.g., § 4.2), a fusion protein described herein (see, e.g., § 4.3); a conjugate described herein (see, e.g., § 4.3); a system described herein (see, e.g., § 4.5) (or any one or more component thereof); a nucleic acid molecule described herein (see, e.g., § 4.6); a vector described herein (see, e.g., § 4.7); a reaction mixture described herein (see, e.g., § 4.10); a carrier described herein (see, e.g., § 4.8); and/or pharmaceutical composition described herein (see, e.g., § 4.11) for use in cleaving a target site in a target nucleic acid (e.g., DNA) molecule (e.g., a double stranded target nucleic acid sequence (e.g., dsDNA, (e.g., genomic dsDNA))) in a subject.

[0456] In one aspect, provided herein are uses of a Cas endonuclease (or a functional fragment, functional variant, or domain thereof) described herein (see, e.g., § 4.2), a fusion protein described herein (see, e.g., § 4.3); a conjugate described herein (see, e.g., § 4.3); a system described herein (see, e.g., § 4.5) (or any one or more component thereof); a nucleic acid molecule described herein (see, e.g., § 4.6); a vector described herein (see, e.g., § 4.7); a reaction mixture described herein (see, e.g., § 4.10); a carrier described herein (see, e.g., § 4.8); and/or pharmaceutical composition described herein (see, e.g., § 4.11) for cleaving a target site in a target nucleic acid (e.g., DNA) molecule (e.g., a double stranded target nucleic acid sequence (e.g., dsDNA, (e.g., genomic dsDNA))) in a subject.

### 4.13.3 Methods of Editing a Target Nucleic Acid Molecule

[0457] In one aspect, provided herein are methods of editing a target site in a target nucleic acid (e.g., DNA) molecule (e.g., a double stranded target nucleic acid sequence (e.g., dsDNA, (e.g., genomic dsDNA))), the method comprising contacting the target nucleic acid (e.g., DNA) molecule (e.g., a double stranded target nucleic acid sequence (e.g., dsDNA, (e.g., genomic dsDNA))) with any one or more of a Cas endonuclease (or a functional fragment, functional variant, or domain thereof) described herein (see, e.g., § 4.2), a fusion protein described herein (see, e.g., § 4.3); a conjugate described herein (see, e.g., § 4.3); a system described herein (see, e.g., § 4.5) (or any one or more component thereof); a nucleic acid molecule described herein (see, e.g., § 4.6); a vector described herein (see, e.g., § 4.7); a reaction mixture described herein (see, e.g., § 4.10); a carrier described herein (see, e.g., § 4.8); and/or pharmaceutical composition described herein (see, e.g., § 4.11), to thereby edit the target nucleic acid (e.g., DNA) molecule (e.g., a double stranded target nucleic acid sequence (e.g., dsDNA, (e.g., genomic dsDNA))). In some embodiments, the endonuclease (or a functional fragment, functional variant, or domain thereof), the fusion protein; the conjugate; the system (or any one or more component thereof); the nucleic acid molecule; the vector; the reaction mixture; the carrier; and/or the pharmaceutical composition is introduced in an amount and for a period of time sufficient to edit target nucleic acid (e.g., DNA) molecule (e.g., a double stranded target nucleic acid sequence (e.g., dsDNA, (e.g., genomic dsDNA))).

[0458] In some embodiments, the edit comprises a substitution, addition, deletion, or inversion of the target site in the target nucleic acid (e.g., DNA) molecule (e.g., a double stranded target nucleic acid sequence (e.g., dsDNA, (e.g., genomic dsDNA))). In some embodiments, the edit comprises an addition, a deletion, or a substitution of one or more nucleotides into/from the target site of the target site in the target nucleic acid (e.g., DNA) molecule (e.g., a double stranded target nucleic acid sequence (e.g., dsDNA, (e.g., genomic dsDNA))). In some embodiments, the edit comprises the addition of one or more nucleotides into the target site in the target nucleic acid (e.g., DNA) molecule (e.g., a double stranded target nucleic acid sequence (e.g., dsDNA, (e.g., genomic dsDNA))). In some embodiments, the addition comprises the addition of from about 1-500, 1-3200, 1-300, 1-200, 1-100, 1-90, 1-80, 1-70, 1-60, 1-50, 1-320, 1-30, 1-20, 1-10, 1-9, 1-8, 1-7, 1-6, 1-5, 1-4, 1-3, or 1-2 nucleotides. In some embodiments, the edit comprises the deletion of one or more nucleotides of the target site in the target nucleic acid (e.g., DNA) molecule (e.g., a double stranded target nucleic acid sequence (e.g., dsDNA, (e.g., genomic dsDNA))). In some embodiments, the deletion comprises the deletion of from about 1-500, 1-3200, 1-300, 1-200, 1-100, 1-90, 1-80, 1-70, 1-60, 1-50, 1-320, 1-30, 1-20, 1-10, 1-9, 1-8, 1-7, 1-6, 1-5, 1-4, 1-3, or 1-2 nucleotides. In some embodiments, the edit comprises the substitution of one or more nucleotides at the target site in the target nucleic acid (e.g., DNA) molecule (e.g., a double stranded target nucleic acid sequence (e.g., dsDNA, (e.g., genomic dsDNA))).

[0459] In some embodiments, the target nucleic acid molecule is a nucleic acid molecule described herein (see, e.g., § 4.5.1). In some embodiments, the target nucleic acid molecule is a DNA molecule. In some embodiments, the target nucleic acid molecule is a dsDNA molecule. In some embodiments, the target nucleic acid molecule is within a cell (e.g., within the genome (e.g., a gene) of a cell (e.g., a eukaryotic cell) in vitro, ex vivo, or in vivo). In some embodiments, the target nucleic acid molecule is a gene (e.g., within a cell (e.g., a eukaryotic cell) (e.g., within a subject (e.g., a human subject)). In some embodiments, the target nucleic acid molecule is a gene within a cell (e.g., a eukaryotic cell) (e.g., within a subject (e.g., a human subject)). In some embodiments, the target nucleic acid molecule is a gene within a cell (e.g., a eukaryotic cell) within a subject (e.g., a human subject). In some embodiments, the target nucleic acid molecule is genomic DNA or RNA. In some embodiments, the target nucleic acid molecule is within the genome of cell (e.g., a eukaryotic cell) (e.g., within a subject (e.g., a human subject)). In some embodiments, the target nucleic acid molecule is within a cell (e.g., within the genome (e.g., a gene) of a cell (e.g., a eukaryotic cell)) within a subject (e.g., a human subject).

[0460] In one aspect, provided herein are a Cas endonuclease (or a functional fragment, functional variant, or domain thereof) described herein (see, e.g., § 4.2), a fusion protein described herein (see, e.g., § 4.3); a conjugate described herein (see, e.g., § 4.3); a system described herein (see, e.g., § 4.5) (or any one or more component thereof); a nucleic acid molecule described herein (see, e.g., § 4.6); a vector described herein (see, e.g., § 4.7); a reaction mixture described herein (see, e.g., § 4.10); a carrier described herein (see, e.g., § 4.8); and/or pharmaceutical composition described herein (see, e.g., § 4.11) for use in cleaving a target site in editing target nucleic acid (e.g., DNA) molecule (e.g., a double stranded target nucleic acid sequence (e.g., dsDNA, (e.g., genomic dsDNA))) in a subject.

[0461] In one aspect, provided herein are uses of a Cas endonuclease (or a functional fragment, functional variant, or domain thereof) described herein (see, e.g., § 4.2), a fusion protein described herein (see, e.g., § 4.3); a conjugate described herein (see, e.g., § 4.3); a system described herein (see, e.g., § 4.5) (or any one or more component thereof); a nucleic acid molecule described herein (see, e.g., § 4.6); a vector described herein (see, e.g., § 4.7); a reaction mixture described herein (see, e.g., § 4.10); a carrier described herein (see, e.g., § 4.8); and/or pharmaceutical composition described herein (see, e.g., § 4.11) for n cleaving a target site in editing target nucleic acid (e.g., DNA) molecule (e.g., a double stranded target nucleic acid sequence (e.g., dsDNA, (e.g., genomic dsDNA))) in a subject.

### 4.13.3.1 Methods of Editing a Target Nucleic Acid Molecule Utilizing an RT-Based System

[0462] In one aspect, provided herein are methods of editing a target site in a target nucleic acid (e.g., DNA) molecule (e.g., a double stranded target nucleic acid sequence (e.g., dsDNA, (e.g., genomic dsDNA))), the method comprising contacting target nucleic acid (e.g., DNA) molecule (e.g., a double stranded target nucleic acid sequence (e.g., dsDNA, (e.g., genomic dsDNA))) with a fusion protein comprising Cas endonuclease (or a functional fragment, functional variant, or domain thereof) described herein (see, e.g., § 4.2) and a reverse transcriptase (e.g., a reverse transcriptase described herein (see, e.g., § 4.3.1.1)) (or a nucleic acid molecule (e.g., a DNA, RNA, nucleic acid molecule) encoding the fusion protein) and a template RNA (e.g., a single template RNA, a plurality of different template RNAs (e.g., a template RNA described herein (see, e.g., § 4.5.2)) (or a nucleic acid molecule (e.g., a DNA nucleic acid molecule) encoding the template RNA); to thereby edit the target nucleic acid (e.g., DNA) molecule (e.g., a double stranded target nucleic acid sequence (e.g., dsDNA, (e.g., genomic dsDNA))). In some embodiments, the fusion protein and the template gRNA are introduced in an amount and for a period of time sufficient to edit the target site in the target nucleic acid (e.g., DNA) molecule (e.g., a double stranded target nucleic acid sequence (e.g., dsDNA, (e.g., genomic dsDNA))).

[0463] In some embodiments, the edit comprises a substitution, addition, deletion, or inversion of the target site in the target nucleic acid (e.g., DNA) molecule (e.g., a double stranded target nucleic acid sequence (e.g., dsDNA, (e.g., genomic dsDNA))). In some embodiments, the edit comprises an addition, a deletion, or a substitution of one or more nucleotides into/from the target site of the target site in the target nucleic acid (e.g., DNA) molecule (e.g., a double stranded target nucleic acid sequence (e.g., dsDNA, (e.g., genomic dsDNA))). In some embodiments, the edit comprises the addition of one or more nucleotides into the target site in the target nucleic acid (e.g., DNA) molecule (e.g., a double stranded target nucleic acid sequence (e.g., dsDNA, (e.g., genomic dsDNA))). In some embodiments, the addition comprises the addition of from about 1-500, 1-3200, 1-300, 1-200, 1-100, 1-90, 1-80, 1-70, 1-60, 1-50, 1-320, 1-30, 1-20, 1-10, 1-9, 1-8, 1-7, 1-6, 1-5, 1-4, 1-3, or 1-2 nucleotides. In some embodiments, the edit comprises the deletion of one or more nucleotides of the target site in the target nucleic acid (e.g., DNA) molecule (e.g., a double stranded target nucleic acid sequence (e.g., dsDNA, (e.g., genomic dsDNA))). In some embodiments, the deletion comprises the deletion of from about 1-500, 1-3200, 1-300, 1-200, 1-100, 1-90, 1-80, 1-70, 1-60, 1-50, 1-320, 1-30, 1-20, 1-10, 1-9, 1-8, 1-7, 1-6, 1-5, 1-4, 1-3, or 1-2 nucleotides. In some embodiments, the edit comprises the substitution of one or more nucleotides at the target site in the target nucleic acid (e.g., DNA) molecule (e.g., a double stranded target nucleic acid sequence (e.g., dsDNA, (e.g., genomic dsDNA))).

[0464] In some embodiments, the target nucleic acid molecule is a nucleic acid molecule described herein (see, e.g., § 4.5.1). In some embodiments, the target nucleic acid molecule is a DNA molecule. In some embodiments, the target nucleic acid molecule is a dsDNA molecule. In some embodiments, the target nucleic acid molecule is within a cell (e.g., within the genome (e.g., a gene) of a cell (e.g., a eukaryotic cell) in vitro, ex vivo, or in vivo). In some embodiments, the target nucleic acid molecule is a gene (e.g., within a cell (e.g., a eukaryotic cell) (e.g., within a subject (e.g., a human subject)). In some embodiments, the target nucleic acid molecule is a gene within a cell (e.g., a eukaryotic cell) (e.g., within a subject (e.g., a human subject)). In some embodiments, the target nucleic acid molecule is a gene within a cell (e.g., a eukaryotic cell) within a subject (e.g., a human subject). In some embodiments, the target nucleic acid molecule is genomic DNA or RNA. In some embodiments, the target nucleic acid molecule is within the genome of cell (e.g., a eukaryotic cell) (e.g., within a subject (e.g., a human subject)). In some embodiments, the target nucleic acid molecule is within a cell (e.g., within the genome (e.g., a gene) of a cell (e.g., a eukaryotic cell)) within a subject (e.g., a human subject).

[0465] In one aspect, provided herein are methods of editing a target site in a target nucleic acid (e.g., DNA) molecule (e.g., a double stranded target nucleic acid sequence (e.g., dsDNA, (e.g., genomic dsDNA))), the method comprising contacting the target nucleic acid (e.g., DNA) molecule (e.g., a double stranded target nucleic acid sequence (e.g., dsDNA, (e.g., genomic dsDNA))) with a system described in § 4.5.5.2, to thereby edit the target nucleic acid (e.g., DNA) molecule (e.g., a double stranded target nucleic acid sequence (e.g., dsDNA, (e.g., genomic dsDNA))). In some embodiments, the system is introduced in an amount and for a period of time sufficient to edit the target site in the target nucleic acid (e.g., DNA) molecule (e.g., a double stranded target nucleic acid sequence (e.g., dsDNA, (e.g., genomic dsDNA))).

[0466] In some embodiments, the edit comprises a substitution, addition, deletion, or inversion of the target site in the target nucleic acid (e.g., DNA) molecule (e.g., a double stranded target nucleic acid sequence (e.g., dsDNA, (e.g., genomic dsDNA))). In some embodiments, the edit comprises an addition, a deletion, or a substitution of one or more nucleotides into/from the target site of the target site in the target nucleic acid (e.g., DNA) molecule (e.g., a double stranded target nucleic acid sequence (e.g., dsDNA, (e.g., genomic dsDNA))). In some embodiments, the edit comprises the addition of one or more nucleotides into the target site in the target nucleic acid (e.g., DNA) molecule (e.g., a double stranded target nucleic acid sequence (e.g., dsDNA, (e.g., genomic dsDNA))). In some embodiments, the addition comprises the addition of from about 1-500, 1-3200, 1-300, 1-200, 1-100, 1-90, 1-80, 1-70, 1-60, 1-50, 1-320, 1-30, 1-20, 1-10, 1-9, 1-8, 1-7, 1-6, 1-5, 1-4, 1-3, or 1-2 nucleotides. In some embodiments, the edit comprises the deletion of one or more nucleotides of the target site in the target nucleic acid (e.g., DNA) molecule (e.g., a double stranded target nucleic acid sequence (e.g., dsDNA, (e.g., genomic dsDNA))). In some embodiments, the deletion comprises the deletion of from about 1-500, 1-3200, 1-300, 1-200, 1-100, 1-90, 1-80, 1-70, 1-60, 1-50, 1-320, 1-30, 1-20, 1-10, 1-9, 1-8, 1-7, 1-6, 1-5, 1-4, 1-3, or 1-2 nucleotides. In some embodiments, the edit comprises the substitution of one or more nucleotides at the target site in the target nucleic acid (e.g., DNA) molecule (e.g., a double stranded target nucleic acid sequence (e.g., dsDNA, (e.g., genomic dsDNA))).

[0467] In some embodiments, the target nucleic acid molecule is a nucleic acid molecule described herein (see, e.g., § 4.5.1). In some embodiments, the target nucleic acid molecule is a DNA molecule. In some embodiments, the target nucleic acid molecule is a dsDNA molecule. In some embodiments, the target nucleic acid molecule is within a cell (e.g., within the genome (e.g., a gene) of a cell (e.g., a eukaryotic cell) in vitro, ex vivo, or in vivo). In some embodiments, the target nucleic acid molecule is a gene (e.g., within a cell (e.g., a eukaryotic cell) (e.g., within a subject (e.g., a human subject)). In some embodiments, the target nucleic acid molecule is a gene within a cell (e.g., a eukaryotic cell) (e.g., within a subject (e.g., a human subject)). In some embodiments, the target nucleic acid molecule is a gene within a cell (e.g., a eukaryotic cell) within a subject (e.g., a human subject). In some embodiments, the target nucleic acid molecule is genomic DNA or RNA. In some embodiments, the target nucleic acid molecule is within the genome of cell (e.g., a eukaryotic cell) (e.g., within a subject (e.g., a human subject)). In some embodiments, the target nucleic acid molecule is within a cell (e.g., within the genome (e.g., a gene) of a cell (e.g., a eukaryotic cell)) within a subject (e.g., a human subject).

### 4.13.3.2 Methods of Editing a Target Nucleic Acid Molecule Utilizing an HDR-Based System

[0468] In one aspect, provided herein are methods of editing a target site in a target nucleic acid (e.g., DNA) molecule (e.g., a double stranded target nucleic acid sequence (e.g., dsDNA, (e.g., genomic dsDNA))), the method comprising contacting the target nucleic acid (e.g., DNA) molecule (e.g., a double stranded target nucleic acid sequence (e.g., dsDNA, (e.g., genomic dsDNA))) with a system described in § 4.5.5.1, to thereby edit target nucleic acid (e.g., DNA) molecule (e.g., a double stranded target nucleic acid sequence (e.g., dsDNA, (e.g., genomic dsDNA))). In some embodiments, the system is introduced in an amount and for a period of time sufficient to edit the target site in the target nucleic acid (e.g., DNA) molecule (e.g., a double stranded target nucleic acid sequence (e.g., dsDNA, (e.g., genomic dsDNA))).

[0469] In some embodiments, the edit comprises a substitution, addition, deletion, or inversion of the target site in the target nucleic acid (e.g., DNA) molecule (e.g., a double stranded target nucleic acid sequence (e.g., dsDNA, (e.g., genomic dsDNA))). In some embodiments, the edit comprises an addition, a deletion, or a substitution of one or more nucleotides into/from the target site of the target site in the target nucleic acid (e.g., DNA) molecule (e.g., a double stranded target nucleic acid sequence (e.g., dsDNA, (e.g., genomic dsDNA))). In some embodiments, the edit comprises the addition of one or more nucleotides into the target site in the target nucleic acid (e.g., DNA) molecule (e.g., a double stranded target nucleic acid sequence (e.g., dsDNA, (e.g., genomic dsDNA))). In some embodiments, the addition comprises the addition of from about 1-500, 1-3200, 1-300, 1-200, 1-100, 1-90, 1-80, 1-70, 1-60, 1-50, 1-320, 1-30, 1-20, 1-10, 1-9, 1-8, 1-7, 1-6, 1-5, 1-4, 1-3, or 1-2 nucleotides. In some embodiments, the edit comprises the deletion of one or more nucleotides of the target site in the target nucleic acid (e.g., DNA) molecule (e.g., a double stranded target nucleic acid sequence (e.g., dsDNA, (e.g., genomic dsDNA))). In some embodiments, the deletion comprises the deletion of from about 1-500, 1-3200, 1-300, 1-200, 1-100, 1-90, 1-80, 1-70, 1-60, 1-50, 1-320, 1-30, 1-20, 1-10, 1-9, 1-8, 1-7, 1-6, 1-5, 1-4, 1-3, or 1-2 nucleotides. In some embodiments, the edit comprises the substitution of one or more nucleotides at the target site in the target nucleic acid (e.g., DNA) molecule (e.g., a double stranded target nucleic acid sequence (e.g., dsDNA, (e.g., genomic dsDNA))).

[0470] In some embodiments, the target nucleic acid molecule is a nucleic acid molecule described herein (see, e.g., § 4.5.1). In some embodiments, the target nucleic acid molecule is a DNA molecule. In some embodiments, the target nucleic acid molecule is a dsDNA molecule. In some embodiments, the target nucleic acid molecule is within a cell (e.g., within the genome (e.g., a gene) of a cell (e.g., a eukaryotic cell) in vitro, ex vivo, or in vivo). In some embodiments, the target nucleic acid molecule is a gene (e.g., within a cell (e.g., a eukaryotic cell) (e.g., within a subject (e.g., a human subject)). In some embodiments, the target nucleic acid molecule is a gene within a cell (e.g., a eukaryotic cell) (e.g., within a subject (e.g., a human subject)). In some embodiments, the target nucleic acid molecule is a gene within a cell (e.g., a eukaryotic cell) within a subject (e.g., a human subject). In some embodiments, the target nucleic acid molecule is genomic DNA or RNA. In some embodiments, the target nucleic acid molecule is within the genome of cell (e.g., a eukaryotic cell) (e.g., within a subject (e.g., a human subject)). In some embodiments, the target nucleic acid molecule is within a cell (e.g., within the genome (e.g., a gene) of a cell (e.g., a eukaryotic cell)) within a subject (e.g., a human subject).

### 4.13.3.3 Methods of Editing a Target Nucleic Acid Molecule Utilizing a Nucleobase Editor-Based System

[0471] In one aspect, provided herein are methods of editing a target site in a target nucleic acid (e.g., DNA) molecule (e.g., a double stranded target nucleic acid sequence (e.g., dsDNA, (e.g., genomic dsDNA))), the method comprising contacting the target nucleic acid (e.g., DNA) molecule (e.g., a double stranded target nucleic acid sequence (e.g., dsDNA, (e.g., genomic dsDNA))) with a system described in § 4.5.5.3, to thereby edit the target nucleic acid (e.g., DNA) molecule (e.g., a double stranded target nucleic acid sequence (e.g., dsDNA, (e.g., genomic dsDNA))). In some embodiments, the system is introduced in an amount and for a period of time sufficient to edit the target site in the target nucleic acid (e.g., DNA) molecule (e.g., a double stranded target nucleic acid sequence (e.g., dsDNA, (e.g., genomic dsDNA))).

[0472] In some embodiments, the edit comprises a substitution, addition, deletion, or inversion of the target site in the target nucleic acid (e.g., DNA) molecule (e.g., a double stranded target nucleic acid sequence (e.g., dsDNA, (e.g., genomic dsDNA))). In some embodiments, the edit comprises an addition, a deletion, or a substitution of one or more nucleotides into/from the target site of the target site in the target nucleic acid (e.g., DNA) molecule (e.g., a double stranded target nucleic acid sequence (e.g., dsDNA, (e.g., genomic dsDNA))). In some embodiments, the edit comprises the addition of one or more nucleotides into the target site in the target nucleic acid (e.g., DNA) molecule (e.g., a double stranded target nucleic acid sequence (e.g., dsDNA, (e.g., genomic dsDNA))). In some embodiments, the addition comprises the addition of from about 1-500, 1-3200, 1-300, 1-200, 1-100, 1-90, 1-80, 1-70, 1-60, 1-50, 1-320, 1-30, 1-20, 1-10, 1-9, 1-8, 1-7, 1-6, 1-5, 1-4, 1-3, or 1-2 nucleotides. In some embodiments, the edit comprises the deletion of one or more nucleotides of the target site in the target nucleic acid (e.g., DNA) molecule (e.g., a double stranded target nucleic acid sequence (e.g., dsDNA, (e.g., genomic dsDNA))). In some embodiments, the deletion comprises the deletion of from about 1-500, 1-3200, 1-300, 1-200, 1-100, 1-90, 1-80, 1-70, 1-60, 1-50, 1-320, 1-30, 1-20, 1-10, 1-9, 1-8, 1-7, 1-6, 1-5, 1-4, 1-3, or 1-2 nucleotides. In some embodiments, the edit comprises the substitution of one or more nucleotides at the target site in the target nucleic acid (e.g., DNA) molecule (e.g., a double stranded target nucleic acid sequence (e.g., dsDNA, (e.g., genomic dsDNA))).

[0473] In some embodiments, the target nucleic acid molecule is a nucleic acid molecule described herein (see, e.g., § 4.5.1). In some embodiments, the target nucleic acid molecule is a DNA molecule. In some embodiments, the target nucleic acid molecule is a dsDNA molecule. In some embodiments, the target nucleic acid molecule is within a cell (e.g., within the genome (e.g., a gene) of a cell (e.g., a eukaryotic cell) in vitro, ex vivo, or in vivo). In some embodiments, the target nucleic acid molecule is a gene (e.g., within a cell (e.g., a eukaryotic cell) (e.g., within a subject (e.g., a human subject)). In some embodiments, the target nucleic acid molecule is a gene within a cell (e.g., a eukaryotic cell) (e.g., within a subject (e.g., a human subject)). In some embodiments, the target nucleic acid molecule is a gene within a cell (e.g., a eukaryotic cell) within a subject (e.g., a human subject). In some embodiments, the target nucleic acid molecule is genomic DNA or RNA. In some embodiments, the target nucleic acid molecule is within the genome of cell (e.g., a eukaryotic cell) (e.g., within a subject (e.g., a human subject)). In some embodiments, the target nucleic acid molecule is within a cell (e.g., within the genome (e.g., a gene) of a cell (e.g., a eukaryotic cell)) within a subject (e.g., a human subject).

[0474] Standard methods of assessing the editing of a target nucleic acid molecule (e.g., in a cell) are known in the art and described herein. See, e.g., §§ 4.5.4, 5.2. See also, e.g., Glaser A, McColl B, Vadolas J. GFP to BFP Conversion: A Versatile Assay for the Quantification of CRISPR/Cas9-mediated Genome Editing [published correction appears in Mol Ther Nucleic Acids. 2016 Sep. 13; 5(9):e360]. Mol Ther Nucleic Acids. 2016; 5(7):e334. Published 2016 Jul. 12. doi:10.1038/mtna.2016.48, the entire contents of which are incorporated by reference herein for all purposes.

### 4.13.4 Methods of Treating, Ameliorating, or Preventing a Disease

[0475] In one aspect, provided herein are methods of treating, ameliorating, or preventing a disease in a subject (e.g., a human subject) in need thereof, the method comprising administering to the subject any one or more of a Cas endonuclease (or a functional fragment, functional variant, or domain thereof) described herein (see, e.g., § 4.2), a fusion protein described herein (see, e.g., § 4.3); a conjugate described herein (see, e.g., § 4.3); a system described herein (see, e.g., § 4.5) (or any one or more component thereof); a nucleic acid molecule described herein (see, e.g., § 4.6); a vector described herein (see, e.g., § 4.7); a reaction mixture described herein (see, e.g., § 4.10); a carrier described herein (see, e.g., § 4.8); and/or pharmaceutical composition described herein (see, e.g., § 4.11), to thereby treat, ameliorate, or prevent the disease in the subject (e.g., the human subject). In some embodiments, the endonuclease (or a functional fragment, functional variant, or domain thereof), the fusion protein; the conjugate; the system (or any one or more component thereof); the nucleic acid molecule; the vector; the reaction mixture; the carrier; and/or the pharmaceutical composition is introduced in an amount and for a period of time sufficient to treat, ameliorate, or prevent the disease in the subject (e.g., the human subject).

[0476] Exemplary diseases include, but are not limited to, e.g., genetic disorders; cancer (e.g., cancers associated with genetic variations (e.g., point mutations, alternatively splicing, gene duplications, etc.); diseases associated with overexpression of RNA, toxic RNA, and/or mutated RNA (e.g., splicing defects or truncations); and infections (e.g., a viral, bacterial, parasitic, or protozoal infection). In some embodiments, the disease is a genetic disorder.

[0477] In some embodiments, the subject is a mammal, animal, primate, non-human primate, or human. In some embodiments, the subject is a human.

[0478] In some embodiments, the disease is associated with a genetic defect. In some embodiments, wherein a gRNA and a Cas endonuclease (e.g., of a system described herein) are administered to the subject, the gRNA is capable of targeting the endonuclease to the site of the genetic defect. In some embodiments, the genetic defect comprises a duplication of a gene, deletion of a gene, or a mutation of a gene. In some embodiments, the administration results in the correction of the genetic defect. In some embodiments, the genetic defect comprises a mutation in a gene. In some embodiments, the mutation is a substitution, addition, deletion, or inversion. In some embodiments, the genetic defect comprises a mutation in a gene and the administration corrects the mutation (e.g., substitution, addition, deletion, or inversion) in the gene. In some embodiments, the administration results in the replacement of the mutated nucleotide sequence with the corresponding wild type nucleotide sequence. In some embodiments, the genetic defect is a deletion of a gene (or a portion thereof). In some embodiments, the genetic defect is a deletion of part or an entire gene and the administration inserts the deleted gene (or portion thereof). In some embodiments, the genetic defect is the duplication of a gene (or a portion thereof). In some embodiments, the genetic defect is the duplication of a gene (or a portion thereof), and the administration deletes the duplicated gene (or the portion thereof).

[0479] In some embodiments, the administration results in the editing of a target site in a target nucleic acid (e.g., DNA) molecule (e.g., a double stranded target nucleic acid sequence (e.g., dsDNA, (e.g., genomic dsDNA))). In some embodiments, the edit comprises a substitution, addition, deletion, or inversion of the target site in the target nucleic acid (e.g., DNA) molecule (e.g., a double stranded target nucleic acid sequence (e.g., dsDNA, (e.g., genomic dsDNA))). In some embodiments, the edit comprises an addition, a deletion, or a substitution of one or more nucleotides into/from the target site of the target site in the target nucleic acid (e.g., DNA) molecule (e.g., a double stranded target nucleic acid sequence (e.g., dsDNA, (e.g., genomic dsDNA))). In some embodiments, the edit comprises the addition of one or more nucleotides into the target site in the target nucleic acid (e.g., DNA) molecule (e.g., a double stranded target nucleic acid sequence (e.g., dsDNA, (e.g., genomic dsDNA))). In some embodiments, the addition comprises the addition of from about 1-500, 1-3200, 1-300, 1-200, 1-100, 1-90, 1-80, 1-70, 1-60, 1-50, 1-320, 1-30, 1-20, 1-10, 1-9, 1-8, 1-7, 1-6, 1-5, 1-4, 1-3, or 1-2 nucleotides. In some embodiments, the edit comprises the deletion of one or more nucleotides of the target site in the target nucleic acid (e.g., DNA) molecule (e.g., a double stranded target nucleic acid sequence (e.g., dsDNA, (e.g., genomic dsDNA))). In some embodiments, the deletion comprises the deletion of from about 1-500, 1-3200, 1-300, 1-200, 1-100, 1-90, 1-80, 1-70, 1-60, 1-50, 1-320, 1-30, 1-20, 1-10, 1-9, 1-8, 1-7, 1-6, 1-5, 1-4, 1-3, or 1-2 nucleotides. In some embodiments, the edit comprises the substitution of one or more nucleotides at the target site in the target nucleic acid (e.g., DNA) molecule (e.g., a double stranded target nucleic acid sequence (e.g., dsDNA, (e.g., genomic dsDNA))).

[0480] In one aspect, provided herein are a Cas endonuclease (or a functional fragment, functional variant, or domain thereof) described herein (see, e.g., § 4.2), a fusion protein described herein (see, e.g., § 4.3); a conjugate described herein (see, e.g., § 4.3); a system described herein (see, e.g., § 4.5) (or any one or more component thereof); a nucleic acid molecule described herein (see, e.g., § 4.6); a vector described herein (see, e.g., § 4.7); a reaction mixture described herein (see, e.g., § 4.10); a carrier described herein (see, e.g., § 4.8); and/or pharmaceutical composition described herein (see, e.g., § 4.11) for the manufacture of a medicament.

[0481] In one aspect, provided herein are uses of a Cas endonuclease (or a functional fragment, functional variant, or domain thereof) described herein (see, e.g., § 4.2), a fusion protein described herein (see, e.g., § 4.3); a conjugate described herein (see, e.g., § 4.3); a system described herein (see, e.g., § 4.5) (or any one or more component thereof); a nucleic acid molecule described herein (see, e.g., § 4.6); a vector described herein (see, e.g., § 4.7); a reaction mixture described herein (see, e.g., § 4.10); a carrier described herein (see, e.g., § 4.8); and/or pharmaceutical composition described herein (see, e.g., § 4.11) for the manufacture of a medicament for the treatment of a disease in a subject in need thereof (e.g., a disease is associated with a genetic defect).

[0482] In one aspect, provided herein are a Cas endonuclease (or a functional fragment, functional variant, or domain thereof) described herein (see, e.g., § 4.2), a fusion protein described herein (see, e.g., § 4.3); a conjugate described herein (see, e.g., § 4.3); a system described herein (see, e.g., § 4.5) (or any one or more component thereof); a nucleic acid molecule described herein (see, e.g., § 4.6); a vector described herein (see, e.g., § 4.7); a reaction mixture described herein (see, e.g., § 4.10); a carrier described herein (see, e.g., § 4.8); and/or pharmaceutical composition described herein (see, e.g., § 4.11) for the manufacture of a medicament for the treatment of a disease in a subject in need thereof (e.g., a disease is associated with a genetic defect).

### 5. EXAMPLES

### Table of Contents

[0483] 5.1 Example 1. Cas Endonuclease Generation and Expression.
[0484] 5.2 Example 2. Nucleic Acid Editing Activity of Cas Endonucleases.
[0485] 5.3 Example 3. Nucleic Acid Editing Activity of Exemplary Cas Endonucleases.
[0486] 5.4 Example 4. Nucleic Acid Editing Activity of Cas Endonucleases in HBB K562 cells.

### 5.1 Example 1. Cas Endonuclease Generation and Expression

[0487] Novel endonucleases 41-360 (CasEnds 41-360) (set forth in Table 1 and SEQ ID NOS: 1-320) were identified by the inventors through a process of rational design, computer-aided design, molecular modeling and binding and functional screening of over 690 candidate library sequences.

[0488] The endonucleases were expressed using standard methods known in the art. A reference Cas endonuclease (Cas9 Nickase) was also expressed according to the methods described above. The amino acid sequence of the reference Cas endonuclease is set forth in Table 5 and in SEQ ID NO: 321.

TABLE 5
The Amino Acid Sequence of Reference Cas Endonuclease.

| | | SEQ |
|---|---|---|
| Description | Amino Acid Sequence | ID NO |
| Reference Cas | MDKKYSIGLDIGTNSVGWAVITDEYKVPSKKFKVLGNTDRHSIKKNLIGA | 321 |
| Endonuclease | LLFDSGETAEATRLKRTARRRYTRRKNRICYLQEIFSNEMAKVDDSFFHR | |
| Cas9 Nickase | LEESFLVEEDKKHERHPIFGNIVDEVAYHEKYPTIYHLRKKLVDSTDKAD | |
| N863A | LRLIYLALAHMIKFRGHFLIEGDLNPDNSDVDKLFIQLVQTYNQLFEENP | |
| | INASGVDAKAILSARLSKSRRLENLIAQLPGEKKNGLFGNLIALSLGLTP | |
| | NFKSNFDLAEDAKLQLSKDTYDDDLDNLLAQIGDQYADLFLAAKNLSDAI | |
| | LLSDILRVNTEITKAPLSASMIKRYDEHHQDLTLLKALVRQQLPEKYKEI | |
| | FFDQSKNGYAGYIDGGASQEEFYKFIKPILEKMDGTEELLVKLNREDLLR | |
| | KQRTFDNGSIPHQIHLGELHAILRRQEDFYPFLKDNREKIEKILTFRIPY | |
| | YVGPLARGNSRFAWMTRKSEETITPWNFEEVVDKGASAQSFIERMINFDK | |
| | NLPNEKVLPKHSLLYEYFTVYNELTKVKYVTEGMRKPAFLSGEQKKAIVD | |
| | LLFKTNRKVTVKQLKEDYFKKIECFDSVEISGVEDRFNASLGTYHDLLKI | |
| | IKDKDFLDNEENEDILEDIVLTLTLFEDREMIEERLKTYAHLEDDKVMKQ | |
| | LKRRRYTGWGRLSRKLINGIRDKQSGKTILDFLKSDGFANRNFMQLIHDD | |
| | SLTFKEDIQKAQVSGQGDSLHEHIANLAGSPAIKKGILQTVKVVDELVKV | |
| | MGRHKPENIVIEMARENQTTQKGQKNSRERMKRIEEGIKELGSQILKEHP | |
| | VENTQLQNEKLYLYYLQNGRDMYVDQELDINRLSDYDVDHIVPQSFLKDD | |
| | SIDNKVLTRSDKARGKSDNVPSEEVVKKMKNYWRQLLNAKLITQRKFDNL | |
| | TKAERGGLSELDKAGFIKRQLVETRQITKHVAQILDSRMNTKYDENDKLI | |
| | REVKVITLKSKLVSDFRKDFQFYKVREINNYHHAHDAYLNAVVGTALIKK | |
| | YPKLESEFVYGDYKVYDVRKMIAKSEQEIGKATAKYFFYSNIMNFFKTEI | |
| | TLANGEIRKRPLIETNGETGEIVWDKGRDFATVRKVLSMPQVNIVKKTEV | |
| | QTGGFSKESILPKRNSDKLIARKKDWDPKKYGGFDSPTVAYSVLVVAKVE | |
| | KGKSKKLKSVKELLGITIMERSSFEKNPIDFLEAKGYKEVKKDLIIKLPK | |
| | YSLFELENGRKRMLASAGELQKGNELALPSKYVNFLYLASHYEKLKGSPE | |
| | DNEQKQLFVEQHKHYLDEIIEQISEFSKRVILADANLDKVLSAYNKHRDK | |
| | PIREQAENIIHLFTLTNLGAPAAFKYFDTTIDRKRYTSTKEVLDATLIHQ | |
| | SITGLYETRIDLSQLGGD | |

### 5.2 Example 2. Nucleic Acid Editing Activity of Cas Endonucleases

[0489] The ability of the candidate endonucleases, including endonucleases 41-360 (CasEnds 41-360) (set forth in Table 1 and SEQ ID NOS: 1-320), to mediate target nucleic acid editing was assessed utilizing a blue fluorescent protein (BFP) to green fluorescent protein (GFP) conversion assay, wherein programmed nucleotide editing of the BFP gene was measured by the expression of GFP (signifying the conversion of GFP to BFP via the programmed nucleotide edit in the BFP gene). The conversion assay was conducted utilizing a reverse transcriptase-based system (as described herein) comprising a template RNA (designed to convert BFP to GFP) and a fusion protein comprising a retroviral reverse transcriptase and the individual subject Cas endonuclease.

[0490] The nucleotide sequence of the template RNA is set forth in Table 6.

TABLE 6
The Nucleotide Sequence of Template RNA.

| | | SEQ |
|---|---|---|
| Description | Nucleotide Sequence | ID NO |
| Template | GCCGAAGCACTGCACGCCGTGTTTTAGAGCTAGAAATAGCAAGTTAAAAT | 322 |
| RNA | AAGGCTAGTCCGTTATCAACTTGAAAAAGTGGCACCGAGTCGGTGCACCC | |
| | TGACGTACGGCGTGCAGTGCTT | |

[0491] The amino acid sequence of the base portion of the fusion protein (without the individual subject Cas endonuclease) is set forth in Table 7.

TABLE 7
The Amino Acid Sequence of the Fusion Protein.

| | | SEQ |
|---|---|---|
| Description | Nucleotide Sequence | ID NO |
| Fusion | MPAAKRVKLDGGDKKYSIGLDIGTNSVGWAVITDEYKVPSKKFKVLGNTD | 323 |
| Protein | RHSIKKNLIGALLFDSGETAEATRLKRTARRRYTRRKNRICYLQEIFSNE | |
| | MAKVDDSFFHRLEESFLVEEDKKHERHPIFGNIVDEVAYHEKYPTIYHLR | |
| | KKLVDSTDKADLRLIYLALAHMIKFRGHFLIEGDLNPDNSDVDKLFIQLV | |
| | QTYNQLFEENPINASGVDAKAILSARLSKSRRLENLIAQLPGEKKNGLFG | |
| | NLIALSLGLTPNFKSNFDLAEDAKLQLSKDTYDDDLDNLLAQIGDQYADL | |
| | FLAAKNLSDAILLSDILRVNTEITKAPLSASMIKRYDEHHQDLTLLKALV | |
| | RQQLPEKYKEIFFDQSKNGYAGYIDGGASQEEFYKFIKPILEKMDGTEEL | |
| | LVKLNREDLLRKQRTFDNGSIPHQIHLGELHAILRRQEDFYPFLKDNREK | |
| | IEKILTFRIPYYVGPLARGNSRFAWMTRKSEETITPWNFEEVVDKGASAQ | |
| | SFIERMTNFDKNLPNEKVLPKHSLLYEYFTVYNELTKVKYVTEGMRKPAF | |
| | LSGEQKKAIVDLLFKTNRKVTVKQLKEDYFKKIECFDSVEISGVEDRFNA | |
| | SLGTYHDLLKIIKDKDFLDNEENEDILEDIVLTLTLFEDREMIEERLKTY | |
| | AHLFDDKVMKQLKRRRYTGWGRLSRKLINGIRDKQSGKTILDFLKSDGFA | |
| | NRNFMQLIHDDSLTFKEDIQKAQVSGQGDSLHEHIANLAGSPAIKKGILQ | |
| | TVKVVDELVKVMGRHKPENIVIEMARENQTTQKGQKNSRERMKRIEEGIK | |
| | ELGSQILKEHPVENTQLQNEKLYLYYLQNGRDMYVDQELDINRLSDYDVD | |
| | HIVPQSFLKDDSIDNKVLTRSDKARGKSDNVPSEEVVKKMKNYWRQLLNA | |
| | KLITQRKFDNLTKAERGGLSELDKAGFIKRQLVETRQITKHVAQILDSRM | |
| | NTKYDENDKLIREVKVITLKSKLVSDFRKDFQFYKVREINNYHHAHDAYL | |
| | NAVVGTALIKKYPKLESEFVYGDYKVYDVRKMIAKSEQEIGKATAKYFFY | |
| | SNIMNFFKTEITLANGEIRKRPLIETNGETGEIVWDKGRDFATVRKVLSM | |
| | PQVNIVKKTEVQTGGFSKESILPKRNSDKLIARKKDWDPKKYGGFDSPTV | |
| | AYSVLVVAKVEKGKSKKLKSVKELLGITIMERSSFEKNPIDFLEAKGYKE | |
| | VKKDLIIKLPKYSLFELENGRKRMLASAGELQKGNELALPSKYVNFLYLA | |
| | SHYEKLKGSPEDNEQKQLFVEQHKHYLDEIIEQISEFSKRVILADANLDK | |
| | VLSAYNKHRDKPIREQAENIIHLFTLTNLGAPAAFKYFDTTIDRKRYTST | |
| | KEVLDATLIHQSITGLYETRIDLSQLGGDGGAEAAAKEAAAKEAAAKEAA | |
| | AKALEAEAAAKEAAAKEAAAKEAAAKAGGTAPLEEEYRLFLEAPIQNVTL | |
| | LEQWKREIPKVWAEINPPGLASTQAPIHVQLLSTALPVRVRQYPITLEAK | |
| | RSLRETIRKFRAAGILRPVHSPWNTPLLPVRKSGTSEYRMVQDLREVNKR | |
| | VETIHPTVPNPYTLLSLLPPDRIWYSVLDLKDAFFCIPLAPESQLIFAFE | |
| | WADAEEGESGQLTWTRLPQGFKNSPTLFNEALNRDLQGFRLDHPSVSLLQ | |
| | YVDDLLIAADTQAACLSATRDLLMTLAELGYRVSGKKAQLCQEEVTYLGF | |
| | KIHKGSRSLSNSRTQAILQIPVPKTKRQVREFLGKIGYCRLFIPGFAELA | |
| | QPLYAATRPGNDPLVWGEKEEEAFQSLKLALTQPPALALPSLDKPFQLFV | |
| | EETSGAAKGVLTQALGPWKRPVAYLSKRLDPVAAGWPRCLRAIAAAALLT | |
| | REASKLIFGQDIEITSSHNLESLLRSPPDKWLTNARITQYQVLLLDPPRV | |
| | RFKQTAALNPATLLPETDDTLPIHHCLDTLDSLTSTRPDLTDQPLAQAEA | |
| | TLFTDGSSYIRDGKRYAGAAVVTLDSVIWAEPLPIGTSAQKAELIALTKA | |
| | LEWSKDKSVNIYTDSRYAFATLHVHGMIYRERGWLTAGGKAIKNAPEILA | |
| | LLTAVWLPKRVAVMHCKGHQKDDAPTSTGNRRADEVAREVAIRPLSTQAT | |
| | ISAGKRTADGSEFEKRTADGSEFESPKKKAKVE | |

[0492] Briefly, 200 ng of plasmid DNA encoding the subject fusion protein (containing one of the subject CasEnds) and 200 ng of template RNA (in plasmid format) were added to 25 μL SF buffer containing 250,000 HEK293T BFP-expressing cells. Nucleofection was mediated utilizing program DS-150. The day of nucleofection was marked as day 0. At day 4, the cells were harvested and analyzed by flow cytometry to assess the level of BFP and GFP expression. Cells having GFP signal were defined as having undergone a successful editing event, and the percent of cells that were GFP+ on day 4 was used to determine the performance of each Cas endonuclease.

[0493] Of the over 690 potential endonucleases generated, around half had editing activity, with some exhibiting even higher editing activity than the editing activity of a reference Cas endonuclease (SEQ ID NO: 321). See, Table 8 below.

TABLE 8
The Relative Editing Activity of Cas Endonucleases.

| Description | SEQ ID NO | Relative Editing Activity |
|---|---|---|
| CasEnd-41 | 1 | +++ |
| CasEnd-42 | 2 | +++ |
| CasEnd-43 | 3 | +++ |
| CasEnd-44 | 4 | +++ |
| CasEnd-45 | 5 | +++ |
| CasEnd-46 | 6 | +++ |
| CasEnd-47 | 7 | +++ |
| CasEnd-48 | 8 | +++ |
| CasEnd-49 | 9 | +++ |
| CasEnd-50 | 10 | +++ |
| CasEnd-51 | 11 | +++ |
| CasEnd-52 | 12 | +++ |
| CasEnd-53 | 13 | +++ |
| CasEnd-54 | 14 | +++ |
| CasEnd-55 | 15 | +++ |
| CasEnd-56 | 16 | +++ |
| CasEnd-57 | 17 | +++ |
| CasEnd-58 | 18 | +++ |
| CasEnd-59 | 19 | +++ |
| CasEnd-60 | 20 | +++ |
| CasEnd-61 | 21 | +++ |
| CasEnd-62 | 22 | ++ |
| CasEnd-63 | 23 | ++ |
| CasEnd-64 | 24 | ++ |
| CasEnd-65 | 25 | ++ |
| CasEnd-66 | 26 | ++ |
| CasEnd-67 | 27 | ++ |
| CasEnd-68 | 28 | ++ |
| CasEnd-69 | 29 | ++ |
| CasEnd-70 | 30 | ++ |
| CasEnd-71 | 31 | ++ |
| CasEnd-72 | 32 | ++ |
| CasEnd-73 | 33 | ++ |
| CasEnd-74 | 34 | ++ |
| CasEnd-75 | 35 | ++ |
| CasEnd-76 | 36 | ++ |
| CasEnd-77 | 37 | ++ |
| CasEnd-78 | 38 | ++ |
| CasEnd-79 | 39 | ++ |
| CasEnd-80 | 40 | ++ |
| CasEnd-81 | 41 | ++ |
| CasEnd-82 | 42 | ++ |
| CasEnd-83 | 43 | ++ |
| CasEnd-84 | 44 | ++ |
| CasEnd-85 | 45 | ++ |
| CasEnd-86 | 46 | ++ |
| CasEnd-87 | 47 | ++ |
| CasEnd-88 | 48 | ++ |
| CasEnd-89 | 49 | ++ |
| CasEnd-90 | 50 | ++ |
| CasEnd-91 | 51 | ++ |
| CasEnd-92 | 52 | ++ |
| CasEnd-93 | 53 | ++ |
| CasEnd-94 | 54 | ++ |
| CasEnd-95 | 55 | ++ |
| CasEnd-96 | 56 | ++ |
| CasEnd-97 | 57 | ++ |
| CasEnd-98 | 58 | ++ |
| CasEnd-99 | 59 | ++ |
| CasEnd-100 | 60 | ++ |
| CasEnd-101 | 61 | ++ |
| CasEnd-102 | 62 | ++ |
| CasEnd-103 | 63 | ++ |
| CasEnd-104 | 64 | ++ |
| CasEnd-105 | 65 | ++ |
| CasEnd-106 | 66 | ++ |
| CasEnd-107 | 67 | ++ |
| CasEnd-108 | 68 | ++ |
| CasEnd-109 | 69 | ++ |
| CasEnd-110 | 70 | ++ |
| CasEnd-111 | 71 | ++ |
| CasEnd-112 | 72 | ++ |
| CasEnd-113 | 73 | ++ |
| CasEnd-114 | 74 | ++ |
| CasEnd-115 | 75 | ++ |
| CasEnd-116 | 76 | ++ |
| CasEnd-117 | 77 | ++ |
| CasEnd-118 | 78 | ++ |
| CasEnd-119 | 79 | ++ |
| CasEnd-120 | 80 | ++ |
| CasEnd-121 | 81 | ++ |
| CasEnd-122 | 82 | ++ |
| CasEnd-123 | 83 | ++ |
| CasEnd-124 | 84 | ++ |
| CasEnd-125 | 85 | ++ |
| CasEnd-126 | 86 | ++ |
| CasEnd-127 | 87 | ++ |
| CasEnd-128 | 88 | ++ |
| CasEnd-129 | 89 | ++ |
| CasEnd-130 | 90 | ++ |
| CasEnd-131 | 91 | ++ |
| CasEnd-132 | 92 | ++ |
| CasEnd-133 | 93 | ++ |
| CasEnd-134 | 94 | ++ |
| CasEnd-135 | 95 | ++ |
| CasEnd-136 | 96 | ++ |
| CasEnd-137 | 97 | ++ |
| CasEnd-138 | 98 | ++ |
| CasEnd-139 | 99 | ++ |
| CasEnd-140 | 100 | ++ |
| CasEnd-141 | 101 | ++ |
| CasEnd-142 | 102 | ++ |
| CasEnd-143 | 103 | ++ |
| CasEnd-144 | 104 | ++ |
| CasEnd-145 | 105 | ++ |
| CasEnd-146 | 106 | ++ |
| CasEnd-147 | 107 | ++ |
| CasEnd-148 | 108 | ++ |
| CasEnd-149 | 109 | ++ |
| CasEnd-150 | 110 | ++ |
| CasEnd-151 | 111 | ++ |
| CasEnd-152 | 112 | ++ |
| CasEnd-153 | 113 | ++ |
| CasEnd-154 | 114 | ++ |
| CasEnd-155 | 115 | ++ |
| CasEnd-156 | 116 | ++ |
| CasEnd-157 | 117 | + |
| CasEnd-158 | 118 | + |
| CasEnd-159 | 119 | + |
| CasEnd-160 | 120 | + |
| CasEnd-161 | 121 | + |
| CasEnd-162 | 122 | + |
| CasEnd-163 | 123 | + |
| CasEnd-164 | 124 | + |
| CasEnd-165 | 125 | + |
| CasEnd-166 | 126 | + |
| CasEnd-167 | 127 | + |
| CasEnd-168 | 128 | + |
| CasEnd-169 | 129 | + |
| CasEnd-170 | 130 | + |
| CasEnd-171 | 131 | + |
| CasEnd-172 | 132 | + |
| CasEnd-173 | 133 | + |
| CasEnd-174 | 134 | + |
| CasEnd-175 | 135 | + |
| CasEnd-176 | 136 | + |
| CasEnd-177 | 137 | + |
| CasEnd-178 | 138 | + |
| CasEnd-179 | 139 | + |
| CasEnd-180 | 140 | + |
| CasEnd-181 | 141 | + |
| CasEnd-182 | 142 | + |
| CasEnd-183 | 143 | + |
| CasEnd-184 | 144 | + |
| CasEnd-185 | 145 | + |
| CasEnd-186 | 146 | + |
| CasEnd-187 | 147 | + |
| CasEnd-188 | 148 | + |
| CasEnd-189 | 149 | + |
| CasEnd-190 | 150 | + |
| CasEnd-191 | 151 | + |
| CasEnd-192 | 152 | + |
| CasEnd-193 | 153 | + |
| CasEnd-194 | 154 | + |
| CasEnd-195 | 155 | + |
| CasEnd-196 | 156 | + |
| CasEnd-197 | 157 | + |
| CasEnd-198 | 158 | + |
| CasEnd-199 | 159 | + |
| CasEnd-200 | 160 | + |
| CasEnd-201 | 161 | + |
| CasEnd-202 | 162 | + |
| CasEnd-203 | 163 | + |
| CasEnd-204 | 164 | + |
| CasEnd-205 | 165 | + |
| CasEnd-206 | 166 | + |
| CasEnd-207 | 167 | + |
| CasEnd-208 | 168 | + |
| CasEnd-209 | 169 | + |
| CasEnd-210 | 170 | + |
| CasEnd-211 | 171 | + |
| CasEnd-212 | 172 | + |
| CasEnd-213 | 173 | + |
| CasEnd-214 | 174 | + |
| CasEnd-215 | 175 | + |
| CasEnd-216 | 176 | + |
| CasEnd-217 | 177 | + |
| CasEnd-218 | 178 | + |
| CasEnd-219 | 179 | + |
| CasEnd-220 | 180 | + |
| CasEnd-221 | 181 | + |
| CasEnd-222 | 182 | + |
| CasEnd-223 | 183 | + |
| CasEnd-224 | 184 | + |
| CasEnd-225 | 185 | + |
| CasEnd-226 | 186 | + |
| CasEnd-227 | 187 | + |
| CasEnd-228 | 188 | + |
| CasEnd-229 | 189 | + |
| CasEnd-230 | 190 | + |
| CasEnd-231 | 191 | + |
| CasEnd-232 | 192 | + |
| CasEnd-233 | 193 | + |
| CasEnd-234 | 194 | + |
| CasEnd-235 | 195 | + |
| CasEnd-236 | 196 | + |
| CasEnd-237 | 197 | + |
| CasEnd-238 | 198 | + |
| CasEnd-239 | 199 | + |
| CasEnd-240 | 200 | + |
| CasEnd-241 | 201 | + |
| CasEnd-242 | 202 | + |
| CasEnd-243 | 203 | + |
| CasEnd-244 | 204 | + |
| CasEnd-245 | 205 | + |
| CasEnd-246 | 206 | + |
| CasEnd-247 | 207 | + |
| CasEnd-248 | 208 | + |
| CasEnd-249 | 209 | + |
| CasEnd-250 | 210 | + |
| CasEnd-251 | 211 | + |
| CasEnd-252 | 212 | + |
| CasEnd-253 | 213 | + |
| CasEnd-254 | 214 | + |
| CasEnd-255 | 215 | + |
| CasEnd-256 | 216 | + |
| CasEnd-257 | 217 | + |
| CasEnd-258 | 218 | + |
| CasEnd-259 | 219 | + |
| CasEnd-260 | 220 | + |
| CasEnd-261 | 221 | + |
| CasEnd-262 | 222 | + |
| CasEnd-263 | 223 | + |
| CasEnd-264 | 224 | + |
| CasEnd-265 | 225 | + |
| CasEnd-266 | 226 | + |
| CasEnd-267 | 227 | + |
| CasEnd-268 | 228 | + |
| CasEnd-269 | 229 | + |
| CasEnd-270 | 230 | + |
| CasEnd-271 | 231 | + |
| CasEnd-272 | 232 | + |
| CasEnd-273 | 233 | + |
| CasEnd-274 | 234 | + |
| CasEnd-275 | 235 | + |
| CasEnd-276 | 236 | + |
| CasEnd-277 | 237 | + |
| CasEnd-278 | 238 | + |
| CasEnd-279 | 239 | + |
| CasEnd-280 | 240 | + |
| CasEnd-281 | 241 | + |
| CasEnd-282 | 242 | + |
| CasEnd-283 | 243 | + |
| CasEnd-284 | 244 | + |
| CasEnd-285 | 245 | + |
| CasEnd-286 | 246 | + |
| CasEnd-287 | 247 | + |
| CasEnd-288 | 248 | + |
| CasEnd-289 | 249 | + |
| CasEnd-290 | 250 | + |
| CasEnd-291 | 251 | + |
| CasEnd-292 | 252 | + |
| CasEnd-293 | 253 | + |
| CasEnd-294 | 254 | + |
| CasEnd-295 | 255 | + |
| CasEnd-296 | 256 | + |
| CasEnd-297 | 257 | + |
| CasEnd-298 | 258 | + |
| CasEnd-299 | 259 | + |
| CasEnd-300 | 260 | + |
| CasEnd-301 | 261 | + |
| CasEnd-302 | 262 | + |
| CasEnd-303 | 263 | + |
| CasEnd-304 | 264 | + |
| CasEnd-305 | 265 | + |
| CasEnd-306 | 266 | + |
| CasEnd-307 | 267 | + |
| CasEnd-308 | 268 | + |
| CasEnd-309 | 269 | + |
| CasEnd-310 | 270 | + |
| CasEnd-311 | 271 | + |
| CasEnd-312 | 272 | + |
| CasEnd-313 | 273 | + |
| CasEnd-314 | 274 | + |
| CasEnd-315 | 275 | + |
| CasEnd-316 | 276 | + |
| CasEnd-317 | 277 | + |
| CasEnd-318 | 278 | + |
| CasEnd-319 | 279 | + |
| CasEnd-320 | 280 | + |
| CasEnd-321 | 281 | + |
| CasEnd-322 | 282 | + |
| CasEnd-323 | 283 | + |
| CasEnd-324 | 284 | + |
| CasEnd-325 | 285 | + |
| CasEnd-326 | 286 | + |
| CasEnd-327 | 287 | + |
| CasEnd-328 | 288 | + |
| CasEnd-329 | 289 | + |
| CasEnd-330 | 290 | + |
| CasEnd-331 | 291 | + |
| CasEnd-332 | 292 | + |
| CasEnd-333 | 293 | + |
| CasEnd-334 | 294 | + |
| CasEnd-335 | 295 | + |
| CasEnd-336 | 296 | + |
| CasEnd-337 | 297 | + |
| CasEnd-338 | 298 | + |
| CasEnd-339 | 299 | + |
| CasEnd-340 | 300 | + |
| CasEnd-341 | 301 | + |
| CasEnd-342 | 302 | + |
| CasEnd-343 | 303 | + |
| CasEnd-344 | 304 | + |
| CasEnd-345 | 305 | + |
| CasEnd-346 | 306 | + |
| CasEnd-347 | 307 | + |
| CasEnd-348 | 308 | + |
| CasEnd-349 | 309 | + |
| CasEnd-350 | 310 | + |
| CasEnd-351 | 311 | + |
| CasEnd-352 | 312 | + |
| CasEnd-353 | 313 | + |
| CasEnd-354 | 314 | + |
| CasEnd-355 | 315 | + |
| CasEnd-356 | 316 | + |
| CasEnd-357 | 317 | + |
| CasEnd-358 | 318 | + |
| CasEnd-359 | 319 | + |
| CasEnd-360 | 320 | + |

[0494] In Table 8, the “+++” indicates that the CasEnd exhibited at least the same level of editing activity as the reference Cas endonuclease in the system; the “++” indicates that the CasEnd exhibited at least 50% of editing activity as the reference Cas endonuclease in the system and less than the same level of editing activity as the reference Cas endonuclease in the system; and the “+” indicates that the CasEnd exhibited at least 10% of editing activity as the reference Cas endonuclease in the system and less than 50% of editing activity as the reference Cas endonuclease in the system.

### 5.3 Example 3. Nucleic Acid Editing Activity of Exemplary Cas Endonucleases

[0495] The ability of several of the endonucleases, set forth in Table 1 to mediate target nucleic acid editing was assessed utilizing a blue fluorescent protein (BFP) to green fluorescent protein (GFP) conversion assay, wherein programmed nucleotide editing of the BFP gene was measured by the expression of GFP (signifying the conversion of GFP to BFP via the programmed nucleotide edit in the BFP gene). The conversion assay was conducted utilizing the reverse transcriptase-based system (as described above in Example 2) comprising a template RNA (designed to convert BFP to GFP) and a fusion protein comprising a retroviral reverse transcriptase and the individual subject Cas endonuclease. The nucleotide sequence of the template RNA is set forth in Table 6 (SEQ ID NO: 322). The amino acid sequence of the base portion of the fusion protein (without the individual subject Cas endonuclease) is set forth in Table 7 (SEQ ID NO: 323).

[0496] Briefly, 200 ng of plasmid DNA encoding the subject fusion protein (containing one of the subject CasEnds) and 200 ng of template RNA (in plasmid format) were added to 25 μL SF buffer containing 250,000 HEK293T BFP-expressing cells. Nucleofection was mediated utilizing program DS-150. The day of nucleofection was marked as day 0. At day 4, the cells were harvested and analyzed by flow cytometry to assess the level of BFP and GFP expression in HEK293T cells. Cells having GFP signal were defined as having undergone a successful editing event, and the percent of cells that were GFP+ on day 4 was used to determine the performance of each Cas endonuclease.

[0497] The editing activity of each Cas endonuclease (relative to the editing activity of a reference Cas endonuclease (SEQ ID NO: 323)) is set forth in Table 9.

TABLE 9
Editing Activity of Cas Endonucleases.

| Description | SEQ ID NO | Editing Activity |
|---|---|---|
| CasEnd-41 | 41 | ++ |
| CasEnd-49 | 49 | ++ |
| CasEnd-59 | 59 | ++ |
| CasEnd-62 | 62 | +++ |
| CasEnd-65 | 65 | ++ |
| CasEnd-107 | 107 | ++ |
| CasEnd-117 | 117 | + |
| CasEnd-120 | 120 | ++ |
| CasEnd-121 | 121 | ++ |
| CasEnd-144 | 144 | ++ |
| CasEnd-148 | 148 | ++ |
| CasEnd-150 | 150 | ++ |
| CasEnd-151 | 151 | ++ |
| CasEnd-156 | 156 | ++ |
| CasEnd-169 | 169 | + |
| CasEnd-174 | 174 | + |
| CasEnd-175 | 175 | ++ |
| CasEnd-179 | 179 | + |
| CasEnd-180 | 180 | ++ |
| CasEnd-181 | 181 | + |
| CasEnd-182 | 183 | ++ |
| CasEnd-183 | 184 | + |
| CasEnd-185 | 185 | ++ |
| CasEnd-186 | 186 | ++ |
| CasEnd-190 | 190 | + |
| CasEnd-194 | 194 | ++ |
| CasEnd-202 | 202 | + |
| CasEnd-203 | 203 | ++ |
| CasEnd-204 | 204 | ++ |
| CasEnd-206 | 206 | + |
| CasEnd-214 | 214 | ++ |
| CasEnd-218 | 218 | + |
| CasEnd-220 | 220 | + |
| CasEnd-228 | 228 | + |
| CasEnd-230 | 230 | + |
| CasEnd-232 | 232 | + |
| CasEnd-234 | 234 | + |
| CasEnd-237 | 237 | + |
| CasEnd-240 | 240 | ++ |
| CasEnd-241 | 241 | + |
| CasEnd-243 | 243 | + |
| CasEnd-245 | 245 | + |
| CasEnd-247 | 247 | ++ |
| CasEnd-252 | 252 | + |
| CasEnd-257 | 257 | ++ |
| CasEnd-261 | 261 | + |
| CasEnd-262 | 262 | ++ |
| CasEnd-273 | 273 | + |
| CasEnd-291 | 291 | + |

[0498] In Table 9, the “+++” indicates that the CasEnd exhibited at least the same level of editing activity as the reference Cas endonuclease in the system; the “++” indicates that the CasEnd exhibited at least 50% of editing activity as the reference Cas endonuclease in the system and less than the same level of editing activity as the reference Cas endonuclease in the system; the “+” indicates that the CasEnd exhibited at least 10% of editing activity as the reference Cas endonuclease in the system and less than 50% of editing activity as the reference Cas endonuclease in the system; and the “−” indicates less than 10% of editing activity as the reference Cas endonuclease in the system.

[0499] As shown in Table 9, several of the Cas endonucleases exhibited at least 50% of the editing activity of a reference Cas endonuclease (SEQ ID NO: 323), with some exhibiting equal to or even higher editing activity compared to the reference Cas endonuclease (SEQ ID NO: 323) (e.g., CasEnd-62).

### 5.4 Example 4. Nucleic Acid Editing Activity of Cas Endonucleases in HBB K562 Cells

[0500] The ability of several of the endonucleases, set forth in Table 1 to mediate target nucleic acid editing was assessed utilizing to mediate target nucleic acid editing in cells was assessed by amplicon sequencing of the endogenous hemoglobin subunit beta (eHBB) gene, wherein the percent of amplicons displaying the intended edit is measured. The editing system is comprised of a template RNA (designed to introduce the Single Nucleotide Polymorphism), a second nick guide RNA, and a fusion protein consisting of retroviral reverse transcriptase and the individual subject Cas endonuclease.

[0501] The nucleotide sequence of the template RNA is set forth in Table 10.

TABLE 10
The Nucleotide Sequence of Template RNA and second nick guide RNA.

| | | SEQ |
|---|---|---|
| Description | Nucleotide Sequence | ID NO |
| Template | CATGGTGCACCTGACTCCTGGTTTTAGAGCTAGAAATAGCAAGTTAAAAT | 659 |
| RNA | AAGGCTAGTCCGTTATCAACTTGAAAAAGTGGCACCGAGTCGGTGCACGG | |
| | CAGACTTCTCTGCCGGAGTCAGGTGC | |
| Second nick | CACGTTCACCTTGCCCCACAGTTTTAGAGCTAGAAATAGCAAGTTAAAAT | 660 |
| guide RNA | AAGGCTAGTCCGTTATCAACTTGAAAAAGTGGCACCGAGTCGGTGC | |

[0502] The amino acid sequence of the base portion of the fusion protein (without the individual subject Cas endonuclease) is set forth in Table 11.

TABLE 11
The Amino Acid Sequence of the Fusion Protein.

| | | SEQ |
|---|---|---|
| Description | Nucleotide Sequence | ID NO |
| Fusion Protein | MPAAKRVKLDGGDKKYSIGLDIGTNSVGWAVITDEYKVPSKKFKVLGNTD | 43 |
| | RHSIKKNLIGALLFDSGETAEATRLKRTARRRYTRRKNRICYLQEIFSNE | |
| | MAKVDDSFFHRLEESFLVEEDKKHERHPIFGNIVDEVAYHEKYPTIYHLR | |
| | KKLVDSTDKADLRLIYLALAHMIKFRGHFLIEGDLNPDNSDVDKLFIQLV | |
| | QTYNQLFEENPINASGVDAKAILSARLSKSRRLENLIAQLPGEKKNGLFG | |
| | NLIALSLGLTPNFKSNFDLAEDAKLQLSKDTYDDDLDNLLAQIGDQYADL | |
| | FLAAKNLSDAILLSDILRVNTEITKAPLSASMIKRYDEHHQDLTLLKALV | |
| | RQQLPEKYKEIFFDQSKNGYAGYIDGGASQEEFYKFIKPILEKMDGTEEL | |
| | LVKLNREDLLRKQRTFDNGSIPHQIHLGELHAILRRQEDFYPFLKDNREK | |
| | IEKILTFRIPYYVGPLARGNSRFAWMTRKSEETITPWNFEEVVDKGASAQ | |
| | SFIERMTNFDKNLPNEKVLPKHSLLYEYFTVYNELTKVKYVTEGMRKPAF | |
| | LSGEQKKAIVDLLFKTNRKVTVKQLKEDYFKKIECFDSVEISGVEDRFNA | |
| | SLGTYHDLLKIIKDKDFLDNEENEDILEDIVLTLTLFEDREMIEERLKTY | |
| | AHLFDDKVMKQLKRRRYTGWGRLSRKLINGIRDKQSGKTILDFLKSDGFA | |
| | NRNFMQLIHDDSLTFKEDIQKAQVSGQGDSLHEHIANLAGSPAIKKGILQ | |
| | TVKVVDELVKVMGRHKPENIVIEMARENQTTQKGQKNSRERMKRIEEGIK | |
| | ELGSQILKEHPVENTQLQNEKLYLYYLQNGRDMYVDQELDINRLSDYDVD | |
| | HIVPQSFLKDDSIDNKVLTRSDKARGKSDNVPSEEVVKKMKNYWRQLLNA | |
| | KLITQRKFDNLTKAERGGLSELDKAGFIKRQLVETRQITKHVAQILDSRM | |
| | NTKYDENDKLIREVKVITLKSKLVSDFRKDFQFYKVREINNYHHAHDAYL | |
| | NAVVGTALIKKYPKLESEFVYGDYKVYDVRKMIAKSEQEIGKATAKYFFY | |
| | SNIMNFFKTEITLANGEIRKRPLIETNGETGEIVWDKGRDFATVRKVLSM | |
| | PQVNIVKKTEVQTGGFSKESILPKRNSDKLIARKKDWDPKKYGGFDSPTV | |
| | AYSVLVVAKVEKGKSKKLKSVKELLGITIMERSSFEKNPIDFLEAKGYKE | |
| | VKKDLIIKLPKYSLFELENGRKRMLASAGELQKGNELALPSKYVNFLYLA | |
| | SHYEKLKGSPEDNEQKQLFVEQHKHYLDEIIEQISEFSKRVILADANLDK | |
| | VLSAYNKHRDKPIREQAENIIHLFTLTNLGAPAAFKYFDTTIDRKRYTST | |
| | KEVLDATLIHQSITGLYETRIDLSQLGGDGGAEAAAKEAAAKEAAAKEAA | |
| | AKALEAEAAAKEAAAKEAAAKEAAAKAGGTAPLEEEYRLFLEAPIQNVTL | |
| | LEQWKREIPKVWAEINPPGLASTQAPIHVQLLSTALPVRVRQYPITLEAK | |
| | RSLRETIRKFRAAGILRPVHSPWNTPLLPVRKSGTSEYRMVQDLREVNKR | |
| | VETIHPTVPNPYTLLSLLPPDRIWYSVLDLKDAFFCIPLAPESQLIFAFE | |
| | WADAEEGESGQLTWTRLPQGFKNSPTLFNEALNRDLQGFRLDHPSVSLLQ | |
| | YVDDLLIAADTQAACLSATRDLLMTLAELGYRVSGKKAQLCQEEVTYLGF | |
| | KIHKGSRSLSNSRTQAILQIPVPKTKRQVREFLGKIGYCRLFIPGFAELA | |
| | QPLYAATRPGNDPLVWGEKEEEAFQSLKLALTQPPALALPSLDKPFQLFV | |
| | EETSGAAKGVLTQALGPWKRPVAYLSKRLDPVAAGWPRCLRAIAAAALLT | |
| | REASKLTFGQDIEITSSHNLESLLRSPPDKWLTNARITQYQVLLLDPPRV | |
| | RFKQTAALNPATLLPETDDTLPIHHCLDTLDSLTSTRPDLTDQPLAQAEA | |
| | TLFTDGSSYIRDGKRYAGAAVVTLDSVIWAEPLPIGTSAQKAELIALTKA | |
| | LEWSKDKSVNIYTDSRYAFATLHVHGMIYRERGWLTAGGKAIKNAPEILA | |
| | LLTAVWLPKRVAVMHCKGHQKDDAPTSTGNRRADEVAREVAIRPLSTQAT | |
| | ISAGKRTADGSEFEKRTADGSEFESPKKKAKVE | |

[0503] Briefly, 250 ng of plasmid DNA encoding the subject fusion protein (containing one of the subject CasEnds), 250 ng each of plasmid DNA encoding the template RNA and the second nick guide RNA were added to 15 μL Lonza SF buffer containing 250,000 K562 cells. Nucleofection was mediated utilizing program FF-120-DA on a Lonza nucleofector. The day of nucleofection was marked as day 0. At day 3, the cells were harvested and subjected to lysis buffer treatment overnight. Genomic DNA was extracted and used for targeted amplicon sequencing to evaluate the performance of each Cas endonucleases based on their percent edit efficiencies.

[0504] The editing activity of each Cas endonuclease (relative to the editing activity of a reference Cas endonuclease (SEQ ID NO: 323)) is set forth in Table 12.

TABLE 12
Editing Activity of Cas Endonucleases.

| Description | SEQ ID NO | Editing Activity |
|---|---|---|
| CasEnd-41 | 41 | + |
| CasEnd-49 | 49 | + |
| CasEnd-59 | 59 | + |
| CasEnd-62 | 62 | − |
| CasEnd-65 | 65 | + |
| CasEnd-107 | 107 | + |
| CasEnd-117 | 117 | − |
| CasEnd-120 | 120 | + |
| CasEnd-121 | 121 | − |
| CasEnd-144 | 144 | + |
| CasEnd-148 | 148 | ++ |
| CasEnd-150 | 150 | − |
| CasEnd-151 | 151 | + |
| CasEnd-156 | 156 | + |
| CasEnd-169 | 169 | + |
| CasEnd-174 | 174 | − |
| CasEnd-175 | 175 | − |
| CasEnd-179 | 179 | − |
| CasEnd-180 | 180 | + |
| CasEnd-181 | 181 | + |
| CasEnd-182 | 183 | − |
| CasEnd-183 | 184 | − |
| CasEnd-185 | 185 | + |
| CasEnd-186 | 186 | − |
| CasEnd-190 | 190 | − |
| CasEnd-194 | 194 | + |
| CasEnd-202 | 202 | + |
| CasEnd-203 | 203 | + |
| CasEnd-204 | 204 | + |
| CasEnd-206 | 206 | + |
| CasEnd-214 | 214 | − |
| CasEnd-218 | 218 | − |
| CasEnd-220 | 220 | + |
| CasEnd-228 | 228 | − |
| CasEnd-230 | 230 | + |
| CasEnd-232 | 232 | + |
| CasEnd-234 | 234 | − |
| CasEnd-237 | 237 | − |
| CasEnd-240 | 240 | − |
| CasEnd-241 | 241 | − |
| CasEnd-243 | 243 | + |
| CasEnd-245 | 245 | − |
| CasEnd-247 | 247 | − |
| CasEnd-252 | 252 | − |
| CasEnd-257 | 257 | − |
| CasEnd-261 | 261 | + |
| CasEnd-262 | 262 | − |
| CasEnd-273 | 273 | + |
| CasEnd-291 | 291 | − |

[0505] In Table 10, the “+++” indicates that the CasEnd exhibited at least the same level of editing activity as the reference Cas endonuclease in the system; the “++” indicates that the CasEnd exhibited at least 50% of editing activity as the reference Cas endonuclease in the system and less than the same level of editing activity as the reference Cas endonuclease in the system; the “+” indicates that the CasEnd exhibited at least 10% of editing activity as the reference Cas endonuclease in the system and less than 50% of editing activity as the reference Cas endonuclease in the system; and the “−” indicates less than 10% of editing activity as the reference Cas endonuclease in the system.

[0506] As shown in Table 10, several of the Cas endonucleases exhibited at least 10% of the editing activity of a reference Cas endonuclease (SEQ ID NO: 323), with some exhibiting at least 50% editing activity compared to the reference Cas endonuclease (SEQ ID NO: 323) (e.g., CasEnd-148).

[0507] Performance of the candidate Cas endonucleases on eHBB target locus is comparable to the orthogonal assay consisting of a cell-based blue fluorescent protein (BFP) to green fluorescent protein (GFP), where single nucleotide editing of the BFP gene converts reporter to GFP.

The application's sequence listing, which the Patent Office published only in electronic form, follows.

SEQUENCE LISTING (660 sequences)

SEQ ID NO: 1 - protein, 1368 aa, synthetic construct
MKKKYSIGLDIGTNSVGWAVITDEYKVPSKKFKVLGNTDRQSIKKNLIGALLFDSGETAEATRLKRTARRRYTRRKNRIRYLQEIFSNEMAKVDDSFFHRLEESFLVEEDKKHERHPIFGNIVDEVAYHEKYPTIYHLRKKLADSTEKADLRLIYLALAHMIKFRGHFLIEGDLNSDNSDVDKLFIQLVQTYNQLFEENPINEEGVDAKAILSARLSKSRRLENLIAQLPGEKKNGLFGNLIALSLGLTPNFKSNFDLAEDAKLQLSKDTYDEDLDNLLAQIGDQYADLFLAAKNLSDAILLSDILRVNSEITKAPLSASMIKRYDEHHQDLTLLKALVRQQLPEKYKEIFFDKSKNGYAGYIDGGASQEEFYKFIKPILEKMDGTEELLAKLNREDFLRKQRTFDNGSIPHQIHLGELHAILRRQEEFYPFLKENREKIEKILTFRIPYYVGPLARGNSRFAWMTRKSEETITPWNFEEVVDKGASAQAFIERMTNFDKNLPTEKVLPKHSLLYEYFTVYNELTKVKYVTEGMRKPEFLSGEQKKEIVDLLFKKNRKVTVKQLKEDYFKKIECFDSVEISGVEDRFNASLGTYHDLLKIIKDKEFLDNEENEDILEDIVLTLTLFEDKEMIEERLKKYANLFDDKVLKQLKRRRYTGWGRLSKKLINGIRDKQSGKTILDFLKSDGFANRNFMQLIHDDSLTFKEEIKKAQVKGQGDSLHEQIANLAGSPAIKKGILQTVKIVDEIVKVMGRHKPENIVIEMARENQTTQKGQKNSRERMKRLEEGIKELGSQILKEHPVENTQLQNEKLYLYYLQNGKDMYTGQELDIDRLSDYDVDHIIPQSFIKDDSIDNKVLTSSKEARGKSDNVPSEEVVKKMKSYWRQLLNAKLISQRKFDNLTKAERGGLSELDKAGFIKRQLVETRQITKHVAQILDSRMNTKYDENDKLIRDVKIITLKSKLVSDFRKDFQFYKVREINNYHHAHDAYLNAVVGTALIKKYPKLESEFVYGDYKVYDVRKMIAKSEQEIGKATAKRFFYSNIMNFFKTEITLANGEIRKRPLIETNEETGEIVWDKEKDFATVRKVLSMPQVNIVKKTEVQTGGFSKESILPKRNSDKLIARKKDWDTKKYGGFDSPTVAYSVLVVAKVEKGKSKKLKSVKELVGITIMERSSFEKDPVAFLEAKGYKEIQKDLIIKLPKYSLFELENGRKRLLASAGELQKGNELALPSKYVTFLYLASHYEKLKGSPEDNEQKQLFVEQHRHYLDEIVDQISEFSKRYILADANLDKVLSLYNKHRDKPIREQAENIINLFTLTNLGAPAAFKFFDTTIDRKRYTSTKEILDATLIHQSITGLYETRIDLSQLGGD

SEQ ID NO: 2 - protein, 1368 aa, synthetic construct
MDKKYSIGLDIGTNSVGWAVITDEYKVPSKKFKVLGNTDRQSIKKNLLGALLFDSGETAEATRLKRTARRRYTRRKNRIRYLQEIFAEEMAKVDDSFFHRLEESFLVEEDKKHERHPIFGNIVDEVAYHEKYPTIYHLRKKLADSTEKADLRLIYLALAHIIKFRGHFLIEGDLNSENSDVQKLFIQLVQTYNQLFEENPINESGVDAKAILSAKLSKSRRLENLIAQFPGEKKNGLFGNLIALSLGLTPNFKSNFDLAEDAKLQLSKDTYDEDLDNLLAQIGDQYADLFLAAKNLSDAILLSDILTVNSEITKAPLSASMIKRYDEHHQDLTLLKALVRQQLPEKYKEIFFDKSKNGYAGYIDGGASQEEFYKFIKPILEKMDGTEELLAKLNREDFLRKQRTFDNGSIPHQIHLGELHAILRRQEDFYPFLKENREKIEKILTFRIPYYVGPLARGNSRFAWMTRKSEETITPWNFEEVVDKGASAQAFIERMTNFDKNLPNEKVLPKHSLLYEYFTVYNELTKVKYVTEGMRKPEFLSGEQKKEIVDLLFKKNRKVTVKQLKEDYFKKIECFDSVEISGVEDRFNASLGTYHDLLKIIKDKDFLDNEENEDILEDIVLTLTLFEDREMIEERLKKYAHLFDDKVLKQLKRRRYTGWGRLSKKLINGIRDKQSGKTILDFLKSDGFANRNFMQLIHDDSLTFKEEIKKAQVSGQGDSLHEQIANLAGSPAIKKGILQTVKIVDELVKVMGRHKPENIVIEMARENQTTQKGQKNSRERMKRIEEGIKELGSQILKEHPVENTQLQNEKLYLYYLQNGKDMYTGQELDIDRLSDYDVDHIIPQSFIKDDSIDNKVLTSSEKARGKSDNVPSEEVVKKMKNYWRQLLNAKLISQRKFDNLTKAERGGLSELDKAGFIKRQLVETRQITKHVAQILDSRMNTKRDENDKLIRDVKIITLKSKLVSDFRKDFQFYKVREINNYHHAHDAYLNAVVGTALIKKYPKLESEFVYGDYKVYDVRKMIAKSEQEIGKATAKRFFYSNIMNFFKTEIKLANGEIRKRPLIETNEETGEIVWDKGKDFATVRKVLSMPQVNIVKKTEVQTGGFSKESILPKRNSDKLIARKKDWDTKKYGGFDSPTVAYSVLVVAKVEKGKSKKLKTVKELVGITIMERSSFEKDPVAFLEAKGYKEIQKDLIIKLPKYSLFELENGRKRLLASAGELQKGNELALPSKYVTFLYLASHYEKLKGSPEDNEKKQLYVEQHKHYFDEIVDQISEFSKRYILADKNLDKILSLYNNFEDKPIREQAENFINLFTLTALGAPAAFKFFDTTIDRKRYTSTKEILNATLIHQSITGLYETRIDLSQLGGD

SEQ ID NO: 3 - protein, 1368 aa, synthetic construct
MDKKYSIGLDIGTNSVGWAVITDEYKVPSKKFKVLGNTDRKSIKKNLIGALLFDSGETAEATRLKRTARRRYTRRKNRIRYLQEIFASEMAKVDDSFFHRLEESFLVEEDKSNERHPIFGNIVDEVAYHEKYPTIYHLRKKLVDSDEKADLRLIYLALAHMIKFRGHFLIEGDLNPDNSDVDKLFIQLVETYNQLFEEKPINASGVDAKAILSAKLSKSRRLENLIAELPGEKKNGLFGNLIALSLGLTPNFKSNFDLSEDAKLQLSKDTYDDDLENLLGQIGDQYADLFSAAKNLSDAILLSDILRVKTEITKAPLSASMIKRYDEHHQDLTLLKALVRQQLPEKYKEIFFDQSKNGYAGYIDGGASQEEFYKFIKKILEKMDGTEELLDKLNREDLLRKQRTFDNGSIPHQIHLGELHAILRRQEKYYPFLKENREKIEKILTFRIPYYVGPLARGNSRFAWMTRKSDETITPWNFDEVVDKGASAQSFIERMTNFDKNLPDEKVLPKHSLLYEYFTVYNELTKVKYVTEGMRKPSFLSGEQKKAIVNLLFKKNRKVTVKQLKEYYFKEIEEFDSVEISGVEDRFNASLGTYHDLLKIIKDKSFLDNEENEKILEDIVLTLTLFEDREMIKKRLEKYANLFDKKVMKQLKRRRYTGWGRLSRKLINGIRDKQSGKTILDFLKDDGFTNRNFMQLIHDDSLTFKDDIEKAQVSDQGESLHEHIANLAGSPAIKKGILQTVKVVDELVKVMGRHKPENIVIEMARENQTTQKGQKNSRERMKRIEEGIKELGSQILKEHPVENTQLQNEKLYLYYLQNGRDMYVDQELDINRLSDYDVDHIVPQSFLKDDSIDNKVLTRSDKARGKSDNVPSEEVVKKMKNYWRQLLNAKLITQRKFDNLTKAERGGLSELDKAGFIKRQLVETRQITKHVAQILDSRMNTKYDENGKLIRDVKVITLKSKLVSDFRKDFQFYKVREINNYHHAHDAYLNAVVGTALIKKYPKLESEFVYGDYKVYDVRKMIAKSEQEIGKATAKYFFYSNIMNFFKSEITLANGEIRKRPLIETNGETGEIVWDKERDFATVRKVLSMPQVNIVKKTEVQTGGFSKESILPKRDSDKLIARKKDWDPKKYGGFDSPTVAYSVLVVAKVEKGKAKKLKTVKELLGITIMERSAFEKNPIAFLEAKGYKNVKKDLIIKLPKYSLFELENGRKRMLASAGELQKGNELALPSKYVNFLYLASHYEKLKGSSEDNKQKQLYVEQHKEYLDEIIDQISEFSERVILADANLEKVLEAYDKHRDKSIEEQAENIIHLFTLTNLGAPAAFKYFGTTIDRKRYTSTKEVLNATLIHQSITGLYETRIDLSQLGGD

SEQ ID NO: 4 - protein, 1368 aa, synthetic construct
MKKKYSIGLDIGTNSVGWAVITDEYKVPSKKFKVLGNTDRQSIKKNLLGALLFDSGETAEATRLKRTARRRYTRRKNRIRYLQEIFAEEMAKVDDSFFHRLEESFLVEEDKKHERHPIFGNIVDEVAYHEKYPTIYHLRKKLADSTEKADLRLIYLALAHMIKFRGHFLIEGDLNSDNSDVDKLFIQLVQTYNQLFEENPINEEGVDAKAILSAKLSKSRRLENLIAQLPGEKKNGLFGNLIALSLGLTPNFKSNFDLAEDAKLQLSKDTYDEDLENLLAQIGDQYADLFLAAKNLSDAILLSDILTVNSEITKAPLSASMIKRYDEHHQDLTLLKALVRQQLPEKYKEIFFDESKNGYAGYIDGGASQEEFYKFIKPILEKMDGTEELLAKLNREDFLRKQRTFDNGSIPHQIHLGELHAILRRQEDFYPFLKENREKIEKILTFRIPYYVGPLARGNSRFAWMTRKSDETITPWNFEEVVDKGASAQAFIERMTNFDKNLPNEKVLPKHSLLYEYFTVYNELTKVKYVTEGMRKPEFLSGEQKKEIVDLLFKKNRKVTVKQLKEDYFKKIECFDSVEISGVEDRFNASLGTYHDLLKIIKDKDFLDNEENEDILEDIVLTLTLFEDKEMIEERLKKYANLFDDKVLKQLKRRRYTGWGRLSKKLINGIRDKQSGKTILDFLKSDGFANRNFMQLIHDDSLTFKEEIKKAQVKGQGDSLHEQIANLAGSPAIKKGILQTVKIVDELVKVMGRHKPENIVIEMARENQTTQKGQKNSRERMKRIEEGIKELGSQILKEHPVENTQLQNEKLYLYYLQNGKDMYTGDELDIDRLSDYDVDHIIPQSFIKDDSIDNKVLTSSEKARGKSDNVPSEEVVKKMKNYWRQLLNAKLISQRKFDNLTKAERGGLSELDKAGFIKRQLVETRQITKHVAQILDSRFNTERDENDKLIRDVKIITLKSKLVSDFRKDFQFYKVREINDYHHAHDAYLNAVVGTALIKKYPKLESEFVYGDYKVYDVRKMIAKSEQEIGKATAKRFFYSNIMNFFKTEITLANGEIRKRPLIETNEETGEIVWDKEKDFATVRKVLSMPQVNIVKKTEVQTGGFSKESILPKRNSDKLIARKKDWDPKKYGGFDSPTVAYSVLVVAKVEKGKSKKLKTVKELVGITIMERSSFEKDPVAFLEAKGYKEIQKDLIIKLPKYSLFELENGRKRLLASAGELQKGNELALPSKYVTFLYLASHYEKLKGSPEDNEQKQLFVEQHKHYFDEILDQISEFSERYILADKNLEKILSLYNKNRDKSISEQAESIINLFTLTALGAPAAFKFFDTTIDRKRYTSTKEILDATLIHQSITGLYETRIDLSQLGGD

SEQ ID NO: 5 - protein, 1368 aa, synthetic construct
MDKKYSIGLDIGTNSVGWAVITDEYKVPSKKFKVLGNTDRHSIKKNLIGALLFDSGETAEATRLKRTARRRYTRRKNRICYLQEIFSNEMAKVDDSFFHRLEESFLVEEDKKHERHPIFGNIVDEVAYHEKYPTIYHLRKKLADSTEKADLRLIYLALAHIIKFRGHFLIEGDLNSDNSDVQKLFIQLVQTYNQLFEENPLDEETVDAKAILTAKLSKSRRLENLIAQLPGEKKNGLFGNLIALSLGLTPNFKSNFDLSEDAKLQLSKDTYDEDLDNLLGQIGDQYADLFLAAKNLSDAILLSGILTVNDEITKAPLSASMIKRYDEHHQDLTLLKALVRQQLPEKYKEIFFDKSKNGYAGYIDGGASQEEFYKYIKPILEKMDGAEELLAKINREDFLRKQRTFDNGSIPHQIHLGELHAILRRQEKFYPFLKENREKIEKILTFRIPYYVGPLARGNSRFAWMTRKSDETITPWNFEEVVDKEASAQAFIERMTNFDKNLPNEKVLPKHSLLYEYFTVYNELTKVKYVTEGMGKPEFFSGEQKQEIVDLLFKKNRKVTVKQLKEFLFKEIECFDSVEISGVEDRFNASLGTYHDLLKIIKDKEFLDNEENEDILEDIVLTLTLFEDREMIEERLKKYANLFDKKVLKKLKRRRYTGWGRLSRKLINGIRDKQSGKTILDFLKSDGFANRNFMQLIHDDSLSFKEEIQKAQVSGQGDSLHEHIANLAGSPAIKKGILQTVKVVDELVKVMGRHKPENIVIEMARENQTTQKGQKNSRERMKRLEEGLKELGSQILKEHPVENTQLQNDKLYLYYLQNGKDMYTGEELDIDRLSDYDVDHIIPQSFIKDDSIDNKVLTSSAKARGKSDNVPSEEVVKKMKSYWRQLLNAKLISQRKFDNLTKAERGGLSELDKAGFIKRQLVETRQITKHVAQILDSRMNTKYDENDKLIREVKVITLKSKLVSDFRKDFQFYKVREINNYHHAHDAYLNAVVGTALIKKYPKLESEFVYGDYKVYDVRKMIAKSEQEIGKATAKYFFYSNIMNFFKTEITLANGEIRKRPLIETNGETGEIVWDKGRDFATVRKVLSMPQVNIVKKTEVQTGGFSKESILPKRNSDKLIARKKDWDTKKYGGFDSPTVAYSVLVVAKIEKGKAKKLKTVKELVGITIMERSSFEKDPVAFLEAKGYKNIQKDLIIKLPKYSLFELENGRKRLLASAGELQKGNELALPNKYVTLLYHAKHYEKLKGSPEDNEKHLEYVEQHRHEFDEILEQISEFSERYILADKNLEKILELYNKNEDYSISELAESFINLFTLTALGAPAAFKFFGTTIDRKRYTSTKEILDATLIHQSITGLYETRIDLSQLGGD

SEQ ID NO: 6 - protein, 1368 aa, synthetic construct
MDKKYSIGLDIGTNSVGWAVITDEYKVPSKKFKVLGNTDRHSIKKNLIGALLFDSGETAEATRLKRTARRRYTRRKNRICYLQEIFSNEMAKVDDSFFHRLEESFLVEEDKRHERHPIFGNIVDEVAYHEKYPTIYHLRKHLADSTEKADLRLIYLALAHIIKFRGHFLIEGDLNSDNSDVDKLFIQLVQTYNQLFEENPINEEGVDAKAILTEKLSKSRRLENLIAQFPGEKRNGLFGNLIALSLGLTPNFKSNFGLAEDAKLQLSKDTYDEDLENLLAQIGDQYADLFLAAKNLSDAILLSDILTVNSEITKAPLSASMIKRYDEHHQDLTLLKALVRQQLPEKYKEIFFDKSKNGYAGYIDGGASQEEFYKYIKPILEKMDGSEYFLAKINREDFLRKQRTFDNGSIPHQIHLGELHAILRRQEDFYPFLKENREKIEKILTFRIPYYVGPLARGNSRFAWMTRKSDETITPWNFEEVVDKEASAQAFIERMTNFDKNLPSEKVLPKHSLLYEYFTVYNELTKVKYVTEGMGKPEFFSAEQKQEIVDLLFKKNRKVTVKRLKEFLFKEIECFRSVEISGVEDAFNASLGTYHDLLKIIKDKDFLDNEENEKILEDIVLTLTLFEDREMIEERLEKYANLFDKKVLKKLKRRRYTGWGRLSKKLINGIRDKQSGKTILDFLKSDGFANRNFMQLIHDDSLTFKDEIKKAQVSGQGDSLHEHIANLAGSPAIKKGILQTVKVVDELVKVMGRHKPENIVIEMARENQTTQKGQKNSRERMKRIEEGIKELGSQILKEHPVENTQLQNEKLYLYYLQNGRDMYVDQELDINRLSDYDVDHIVPQSFLKDDSIDNKVLTRSDKARGKSDNVPSEEVVKKMKNYWRQLLNAKLITQRKFDNLTKAERGGLSELDKAGFIKRQLVETRQITKHVAQILDSRMNTKYDENDKLIREVKVITLKSKLVSDFRKDFQFYKVREINNYHHAHDAYLNAVVGTALIKKYPKLESEFVYGDYKVYDVRKMIAKSEQEIGKATAKYFFYSNIMNFFKTEITLANGEIRKRPLIETNGETGEIVWDKGRDFATVRKVLSMPQVNIVKKTEVQTGGFSKESILPKRNSDKLIARKKDWDPKKYGGFDSPTVAYSVLVVAKVEKGKSKKLKSVKELLGITIMERSSFEKNPIDFLEAKGYKEVKKDLIIKLPKYSLFELENGRKRMLASAGELQKGNELALPSKYVNFLYLASHYEKLKGSPEDNEQKQLFVEQHKHYLDEIIEQISEFSKRVILADANLDKVLSAYNKHRDKPIREQAENIIHLFTLTNLGAPAAFKYFDTTIDRKRYTSTKEVLDATLIHQSITGLYETRIDLSQLGGD

SEQ ID NO: 7 - protein, 1368 aa, synthetic construct
MDKKYSIGLDIGTNSVGWAVITDEYKVPSKKFKVLGNTDRHSIKKNLLGALLFDSGETAEATRLKRTARRRYTRRKNRIRYLQEIFSEEMAKVDDSFFHRLEESFLVEEDKKHERHPIFGNIVDEVAYHENYPTIYHLRKKLADSTEKADLRLIYLALAHIIKFRGHFLIEGDLNPENSDVQKLFIQLVQTYNQLFEENPINESGVDAKAILSARLSKSRRLENLIAQLPGEKKNGLFGNLIALSLGLTPNFKSNFDLAEDAKLQLSKDTYDDDLDNLLAQIGDQYADLFLAAKNLSDAILLSDILTVNDEITKAPLSASMIKRYDEHHQDLTLLKALVRQQLPEKYKEIFFDKSKNGYAGYIDGGASQEEFYKFIKPILEKMDGTEELLAKINREDFLRKQRTFDNGSIPHQIHLGELHAILRRQEDFYPFLKENREKIEKILTFRIPYYVGPLARGNSRFAWMTRKSEETITPWNFEEVVDKGASAQAFIERMTNFDKNLPNEKVLPKHSLLYEYFTVYNELTKVKYVTEGMRKPEFLSGEQKKEIVDLLFKKNRKVTVKQLKEDYFKKIECFDSVEISGVEDRFNASLGTYHDLLKIIKDKDFLDNEENEDILEDIVLTLTLFEDREMIEERLEKYAHLFDKKVLKQLKRRRYTGWGRLSRKLINGIRDKQSGKTILDFLKSDGFANRNFMQLIHDDSLTFKEEIKKAQVIGQGDSLHEQIANLAGSPAIKKGILQSIKIVDELVKVMGRHKPENIVIEMARENQTTQKGQKNSRERMKRIEEGIKELGSQILKEHPVENTQLQNEKLYLYYLQNGRDMYVDQELDINRLSDYDVDHIVPQSFLKDDSIDNKVLTRSDKARGKSDNVPSEEVVKKMKNYWRQLLNAKLITQRKFDNLTKAERGGLSELDKAGFIKRQLVETRQITKHVAQILDSRFNTKYDENDKLIREVKIITLKSKLVSDFRKDFQFYKVREINDYHHAHDAYLNAVVGTALIKKYPKLESEFVYGDYKVYDVRKMIAKSEQEIGKATAKYFFYSNIMNFFKTEITLANGEIRKRPLIETNEETGEIVWDKEKDFATVRKVLSMPQVNIVKKTEVQTGGFSKESILPKRNSDKLIARKKDWDTKKYGGFDSPTVAYSVLVVAKVEKGKSKKLKTVKELVGITIMERSSFEKDPIDFLEAKGYKNIQKDLIIKLPKYSLFELENGRKRMLASAGELQKGNELALPQKYVTLLYLASHYEKLKGSPEDNSQKLEYVEQHRYYFDEIFEQISEFSERYILADKNLDKVKSLYNNHRDKPIREQAENFIHLFTFTSLGAPAAFKFFDTTIDRKRYTSTTEVLDATLIHQSITGLYETRIDLSQLGGD

SEQ ID NO: 8 - protein, 1368 aa, synthetic construct
MDKKYSIGLDIGTNSVGWAVITDEYKVPSKKFKVLGNTDRHSIKKNLIGALLFDSGETAEATRLKRTARRRYTRRKNRIRYLQEIFANEMAKVDDSFFHRLEESFLVEEDKKHERHPIFGNIVDEVAYHEKYPTIYHLRKKLVDSDEKADLRLIYLALAHMIKFRGHFLIEGDLNSDNSDVQKLFIQLVQTYNQLFEESPIEAEKVDAKAILSAKLSKSRRLENLIAQLPGEKKNGLFGNLIALSLGLTPNFKSNFDLAEDAKLQLSKDTYDDDLENLLGQIGDQYADLFLAAKNLSDAILLSGILRVNTEITKAPLSASMIKRYDEHHQDLTLLKQLVRQQLPEKYKEIFFDQSKNGYAGYIDGGASQEEFYKYIKPILEKMDGTEELLAKLEREDLLRKQRTFDNGSIPHQIHLGELHAILRRQEKYYPFLKENREKIEKILTFRIPYYVGPLARGNSRFAWMTRKSDETITPWNFEEVVDKGASAQKFIERMTNFDKNLPNEKVLPKHSLLYEYFTVYNELTKVKYVTEGMRKPEFLSGEQKKEIVDLLFKKNRKVTVKQLKEDYFKKIECFDSVEISGVEDRFNASLGTYHDLLKIIKDKDFLDNEENEDILEDIVLTLTLFEDREMIKERLEKYADLFDKKVMKQLKRRRYTGWGRLSKKLINGIRDKQSGKTILDFLKADGFANRNFMQLIHDDSLTFKEEIQKAQVSGQGDSLHEHIANLAGSPAIKKGILQTVKVVDELVKVMGRHKPENIVIEMARENQTTQKGQKNSRERMKRIEEGIKELGSQILKEHPVENTQLQNEKLYLYYLQNGRDMYVDQELDINRLSDYDVDHIVPQSFLKDDSIDNKVLTRSDKARGKSDNVPSEEVVKKMKNYWRQLLNAKLITQRKFDNLTKAERGGLSELDKAGFIKRQLVETRQITKHVAQILDSRMNTEYDENDKLIRDVKVITLKSKLVSDFRKDFGFYKVREINNYHHAHDAYLNAVVGTALIKKYPKLESEFVYGDYKVYDVRKMIAKSEQEIGKATAKYFFYSNIMNFFKSEITLANGEIRKRPLIETNEETGEIVWDKEKDFATVRKVLSMPQVNIVKKTEVQTGGFSKESILPKRDSDKLIARKKDWDPKKYGGFDSPTVAYSVLVVAKVEKGKTKKLKTVKELLGITIMERSAFEKNPVDFLEAKGYKEVKKDLIIKLPKYSLFELENGRKRMLASAGELQKGNELALPSKYVNFLYLASHYEKLKGKPEDNEQKQLFVEQHKEYLDEIIDQISEFSKRVILADANLEKVKSAYNKHRDKSIEEQAENIIHLFTLTALGAPAAFKYFDTTIDRKRYTSTKEVLNATLIHQSITGLYETRIDLSQLGGD

SEQ ID NO: 9 - protein, 1368 aa, synthetic construct
MDKKYSIGLDIGTNSVGWAVITDEYKVPSKKFKVLGNTDRHSIKKNLIGALLFDSGETAEATRLKRTARRRYTRRKNRIRYLQEIFSEEMAKVDDSFFHRLEESFLVEEDKKNERHPIFGNIVDEVAYHEKYPTIYHLRKKLADSDEKADLRLIYLALAHMIKFRGHFLIEGDLNSDNSDVQKLFIQLVQTYNQLFEENPLNEIGVDAKAILTARLSKSRRLENLIAQFPGEKKNGLFGNLIALSLGLTPNFKSNFDLSEDAKLQLSKDTYDEDLENLLAQIGDQYADLFLAAKNLSDAILLSDILTVNDEITKAPLSASMVKRYDEHHQDLTLLKALVRQQLPEKYKEIFFDQSKNGYAGYIDGGASQEEFYKYLKPILEKMDGSEEFLEKINREDFLRKQRTFDNGSIPHQIHLGELHAILRRQEKYYPFLKENREKIEKILTFRIPYYVGPLARGNSRFAWMTRKSDETITPWNFEEVVDKEASAQSFIERMTNFDKNLPNEKVLPKHSLLYEKFTVYNELTKVKYVTEGMRKPEFLSGEQKQEIVDLLFKKNRKVTVKQLKEDYFKKIECFDSVEISGVEDRFNASLGTYHDLLKIIKDKDFLDNEENEDILEDIVLTLTLFEDREMIEERLKKYANLFDDKVLKQLKRRRYTGWGRLSKKLINGIRDKQSGKTILDFLKADGFANRNFMQLIHDDSLTFKEEIEKAQVSGQGESLHELIANLAGSPAIKKGILQTIKIVDELVKVMGRHAPENIVIEMARENQTTQKGQKNSRERMKRLEEGIKELGSKILKEHPVENTQLQNEKLYLYYLQNGKDMYTGEELDIDRLSDYDVDHIVPQSFLKDDSIDNKVLTSSAKARGKSDNVPSEEVVKKMKNYWRKLLDAKLITQRKFDNLTKAERGGLTELDKAGFIKRQLVETRQITKHVAQILDSRFNTKYDENDKLIRDVKIITLKSKLVSDFRKDFQFYKVREINNYHHAHDAYLNAVVGTALIKKYPKLESEFVYGDYKVYDVRKMIAKSEQEIGKATAKYFFYSNIMNFFKTEITLANGEIRKRPLIETNGETGEIVWDKGKDFATVRKVLSMPQVNIVKKTEVQTGGFSKESILPKRNSDKLIARKKDWDPKKYGGFDSPTVAYSVLVVAKVEKGKAKKLKTVKELVGITIMERSSFEKNPVDFLEAKGYKEVKKDLIIKLPKYSLFELENGRKRLLASAGELQKGNELALPQKYVEFLYLASHYEKLKGSPEDNEQKQLFVEQHKHYFDEIIEQISEFSKRYILADANLEKILSLYEKNRDKPIEEQAESFINLFTLTALGAPAAFKFFDTTIDRKRYTSTKEILDATLIHQSITGLYETRIDLSQLGGD

SEQ ID NO: 10 - protein, 1368 aa, synthetic construct
MDKKYSIGLDIGTNSVGWAVITDEYKVPSKKFKVLGNTDRQSIKKNLIGALLFDSGETAEATRLKRTARRRYTRRKNRIRYLQEIFSEEMAKVDDSFFHRLEESFLVEEDKKHERHPIFGNIVDEVAYHEKYPTIYHLRKKLADSTEKADLRLIYLALAHMIKFRGHFLIEGDLNSDNSDVDKLFIQLVQTYNQLFEENPINESGVDAKAILSAKLSKSRRLENLIAQLPGEKKNGLFGNLIALSLGLTPNFKSNFDLAEDAKLQLSKDTYDEDLDNLLAQIGDQYADLFLAAKNLSDAILLSDILTVNSEITKAPLSASMIKRYDEHHQDLTLLKALVRQQLPEKYKEIFFDKSKNGYAGYIDGGASQEEFYKFIKPILEKMDGTEELLAKLNREDFLRKQRTFDNGSIPHQIHLGELHAILRRQEDFYPFLKENREKIEKILTFRIPYYVGPLARGNSRFAWMTRKSEETITPWNFEEVVDKGASAQAFIERMTNFDKNLPNEKVLPKHSLLYEYFTVYNELTKVKYVTEGMRKPEFLSGEQKKEIVDLLFKKNRKVTVKQLKEDYFKKIECFDSVEISGVEDRFNASLGTYHDLLKIIKDKDFLDNEENEDILEDIVLTLTLFEDREMIEERLKKYANLFDDKVLKQLKRRRYTGWGRLSKKLINGIRDKQSGKTILDFLKSDGFANRNFMQLIHDDSLTFKEEIQKAQVSGQGDSLHEQIANLAGSPAIKKGILQTVKIVDEIVKVMGRHKPENIVIEMARENQTTQKGQKNSRERMKRLEEGIKELGSQILKEHPVENTQLQNEKLYLYYLQNGKDMYTGEELDIDRLSDYDVDHIIPQSFIKDDSIDNKVLTSSDEARGKSDNVPSEEVVKKMKSYWRQLLKAKLISQRKFDNLTKAERGGLSELDKAGFIKRQLVETRQITKHVAQILDSRFNTERDENDKLIRDVKIITLKSKLVSDFRKDFQFYKVREINDYHHAHDAYLNAVVGTALIKKYPKLESEFVYGDYKVYDVRKMIAKSEQEIGKATAKRFFYSNIMNFFKTEIKLANGEIRKRPLIETNEETGEIVWDKEKDFATVRKVLSMPQVNIVKKTEVQTGGFSKESILPKRESDKLIARKKDWDTKKYGGFDSPTVAYSVLVVAKVEKGKTKKLKTVKELVGITIMERSSFEKDPIDFLEAKGYKEVQKDLIIKLPKYSLFELENGRKRLLASAGELQKGNELALPSKYVTFLYLASHYEKLKGSPEDEEQKQLYVEQHKHYFDEIVEQISEFSKRYILADKNLDKILSLYNKHRDKSISEQAESIINLFTLTALGAPAAFKFFDTTIDRKRYTSTKEILNSTLIHQSITGLYETRIDLSQLGGD

SEQ ID NO: 11 - protein, 1368 aa, synthetic construct
MDKKYSIGLDIGTNSVGWAVITDEYKVPSKKFKVLGNTDRQSIKKNLLGALLFDSGETAEATRLKRTARRRYTRRKNRIRYLQEIFAEEMAKVDDSFFHRLEESFLVEEDKKHERHPIFGNIVDEVAYHEKYPTIYHLRKELADSTEKADLRLIYLALAHMIKFRGHFLIEGDLNSDNSDVDKLFIQLVQTYNQLFEENPINEEGVDAKAILSAKLSKSRRLENLIAQLPGEKKNGLFGNLIALSLGLTPNFKSNFDLAEDAKLQLSKDTYDEDLDNLLAQIGDQYADLFLAAKNLSDAILLSDILTVNSEITKAPLSASMIKRYDEHHQDLTLLKALVRQQLPEKYKEIFFDQSKNGYAGYIDGGASQEDFYKFIKPILEKMDGTEELLAKLNREDFLRKQRTFDNGSIPHQIHLGELHAILRRQEEFYPFLKENREKIEKILTFRIPYYVGPLARGNSRFAWMTRKSEETITPWNFEEVVDKGASAQSFIERMTNFDKNLPNEKVLPKHSLLYEYFTVYNELTKVKYVTEGMRKPEFLSGEQKEEIVDLLFKKNRKVTVKQLKEDYFKKIECFDSVEISGVEDRFNASLGTYHDLLKIIKDKDFLDNEENEDILEDIVLTLTLFEDKEMIEERLKKYAHLFDDKVMKQLKRRRYTGWGRLSRKLINGIRDKQSGKTILDFLKSDGFANRNFMQLIHDDSLTFKEEIKKAQVSGQGDSLHEQIANLAGSPAIKKGILQTVKIVDELVKVMGRHKPENIVIEMARENQTTQKGQKNSRERMKRLEEGIKELGSQILKEHPVENTQLQNEKLYLYYLQNGKDMYTGEELDIDRLSDYDVDHIVPQSFIKDDSIDNKVLTSSKEARGKSDNVPSEEVVKKMKNYWRQLLKAKLISQRKFDNLTKAERGGLSELDKAGFIKRQLVETRQITKHVAQILDSRMNTERDENDKLIRDVKIITLKSKLVSDFRKDFQFYKVREINNYHHAHDAYLNAVVGTALIKKYPKLESEFVYGDYKVYDVRKMIAKSEQEIGKATAKRFFYSNIMNFFKTEIKLANGEIRKRPLIETNEETGEIVWDKEKDFATVRKVLSMPQVNIVKKTEVQTGGFSKESILPKRNSDKLIARKKDWDPKKYGGFDSPTVAYSVLVVAKVEKGKSKKLKTVKELVGITIMERSSFEKDPVAFLEKKGYKEVQKDLIIKLPKYSLFELENGRKRLLASAGELQKGNELALPSKYVTFLYLASHYEKLKGSPEDNEQKQLYVEQHKHYLDEILDQISEFSKRYILADKNLEKILSLYNKNEDKSIEEQAENIINLFTLTNLGAPAAFKFFDTTIDRKRYTSTKEILDATLIHQSITGLYETRIDLSQLGGD

SEQ ID NO: 12 - protein, 1368 aa, synthetic construct
MDKKYSIGLDIGTNSVGWAVITDEYKVPSKKFKVLGNTDRQSIKKNLLGALLFDSGETAEATRLKRTARRRYTRRKNRIRYLQEIFSNEMAKVDDSFFHRLEESFLVEEDKKHERHPIFGNIVDEVAYHEKYPTIYHLRKKLADSTEKADLRLIYLALAHMIKFRGHFLIEGDLNPDNSDVDKLFIQLVQTYNQLFEENPINESGVDAKAILSAKLSKSRRLENLIAQLPGEKKNGLFGNLIALSLGLTPNFKSNFDLAEDAKLQLSKDTYDDDLDNLLAQIGDQYADLFLAAKNLSDAILLSDILTVNSEITKAPLSASMIKRYDEHHQDLTLLKALVRQQLPEKYKEIFFDQSKNGYAGYIDGGASQEEFYKYIKPILEKMDGTEELLAKLNREDLLRKQRTFDNGSIPHQIHLGELHAILRRQEDFYPFLKENREKIEKILTFRIPYYVGPLARGNSRFAWMTRKSEETITPWNFEEVVDKGASAQAFIERMTNFDKNLPNEKVLPKHSLLYEYFTVYNELTKVKYVTEGMRKPEFLSGEQKEEIVDLLFKKNRKVTVKQLKEDYFKKIECFDSVEISGVEDRFNASLGTYHDLLKIIKDKDFLDNEENEDILEDIVLTLTLFEDKEMIEERLKKYANLFDDKVMKQLKRRRYTGWGRLSRKLINGIRDKQSGKTILDFLKSDGFANRNFMQLIHDDSLTFKEEIQKAQVSGQGDSLHEQIANLAGSPAIKKGILQTVKIVDEIVKVMGRHKPENIVIEMARENQTTQKGQKNSRERMKRLEEGIKELGSQILKEHPVENTQLQNEKLYLYYLQNGKDMYTGDELDIDRLSDYDVDHIIPQSFIKDDSIDNKVLTSSEKARGKSDNVPSEEVVKKMKNYWRQLLNAKLISQRKFDNLTKAERGGLSELDKAGFIKRQLVETRQITKHVAQILDSRMNTEYDENDKLIRDVKIITLKSKLVSDFRKDFQFYKVREINDYHHAHDAYLNAVVGTALIKKYPKLESEFVYGDYKVYDVRKMIAKSEQEIGKATAKRFFYSNIMNFFKTEITLANGEIRKRPLIETNEETGEIVWDKEKDFATVRKVLSMPQVNIVKKTEVQTGGFSKESILPKRNSDKLIARKKDWDPKKYGGFDSPTVAYSVLVVAKVEKGKSKKLKTVKELVGITIMERSSFEKDPVDFLEAKGYKEIQKDLIIKLPKYSLFELENGRKRLLASAGELQKGNELALPSKYVTFLYLASHYEKLKGSPEDNEQKQLFVEQHRHYFDEILEQISEFSERYILADKNLDKVLSLYNNFRDKSIEEQAENIINLFTLTNLGAPAAFKFFDTTIDRKRYTSTKEVLDSTLIHQSITGLYETRIDLSQLGGD

SEQ ID NO: 13 - protein, 1368 aa, synthetic construct
MDKKYSIGLDIGTNSVGWAVITDEYKVPSKKFKVLGNTDRHSIKKNLIGALLFDSGETAEATRLKRTARRRYTRRKNRICYLQEIFSNEMAKVDDSFFQRLEESFLVEEDKKNERHPIFGNIADEVAYHEKYPTIYHLRKKLADSTEKADLRLIYLALAHMIKFRGHFLIEGDLNSDNSDVQKLFIQLVQTYNQLFEESPLNEEGVDAKAILTEKLSKSRRLENLIAQFPGEKKNGLFGNLIALSLGLTPNFKSNFDLAEDAKLQLSKDTYDEDLENLLGQIGDQYADLFLAAKNLYDAILLSDILTVNDEITKAPLSASMVKRYDEHHQDLKLLKKFVRQQLPEKYKEIFSDKSKNGYAGYIDGKTSQEEFYKYLKPILEKMDGSEEFLEKIEREDFLRKQRTFDNGSIPHQIHLQELHAILRRQEKYYPFLKENREKIEKILTFRIPYYVGPLARGNSRFAWMSRKSDEKITPWNFDEVVDKEASAQKFIERMTNNDLYLPDEKVLPKHSLLYEKFTVYNELTKVKYVTEGMRKPEFLSAEQKQEIVDLLFKKNRKVTKKKLKEYYFKEFECFDSVEITGVDDRFNASLGTYHDLLKIIKDKDFLDNEENEKILEDIVLTLTLFEDREMIKERLEKYANLFDKKQLKQLKRRHYTGWGRLSAKLINGIRDKQSGKTILDYLIDDGFANRNFMQLIHDDSLTFKEEIQKAQVSGDGDSLHEHIANLAGSPAIKKGILQTVKVVDELVKVMGRHKPENIVIEMARENQTTQKGQRNSRQRLKRLEEAIKELGSKILKEHPVENSQLQNDRLYLYYLQNGKDMYTGEELDIDRLSQYDIDHIIPQSFIKDDSIDNRVLVSSAKARGKSDNVPSEEVVKKMKNYWKQLLDAKLISQRKFDNLTKAERGGLSELDKAGFIKRQLVETRQITKHVAQILDSRMNTKYDENDKLIREVKVITLKSKLVSDFRKDFQFYKVREINNYHHAHDAYLNAVVGTALIKKYPKLESEFVYGDYKVYDVRKMIAKSEQEIGKATAKYFFYSNIMNFFKTEITLANGEIRKRPLIETNGETGEIVWDKGRDFATVRKVLSMPQVNIVKKTEVQTGGFSKESILPKRNSDKLIARKKDWDPKKYGGFDSPTVAYSVLVVAKVEKGKSKKLKSVKELLGITIMERSSFEKNPIDFLEAKGYKEVKKDLIIKLPKYSLFELENGRKRMLASAGELQKGNELALPSKYVNFLYLASHYEKLKGSPEDNEQKQLFVEQHKHYLDEIIEQISEFSKRVILADANLDKVLSAYNKHRDKPIREQAENIIHLFTLTNLGAPAAFKYFDTTIDRKRYTSTKEVLDATLIHQSITGLYETRIDLSQLGGD

SEQ ID NO: 14 - protein, 1368 aa, synthetic construct
MKKKYSIGLDIGTNSVGWAVITDEYKVPSKKFKVLGNTDRHSIKKNLIGALLFDSGETAEATRLKRTARRRYTRRKNRIRYLQEIFSEEMAKVDDSFFHRLEESFLVEEDKKHERHPIFGNIVDEVAYHEKYPTIYHLRKELVDSTEKADLRLIYLALAHMIKFRGHFLIEGDLNSENSDVQKLFIQLVQTYNQLFEENPLNEEGVDAKAILSAKLSKSRRLENLIAQFPGEKKNGLFGNLIALSLGLTPNFKSNFDLAEDAKLQLSKDTYDDDLENLLGQIGDQYADLFLAAKNLSDAILLSDILRVNTEITKAPLSASMIKRYDEHHQDLTLLKALVRKQLPEKYKEIFFDKSKNGYAGYIDGGASQEEFYKFIKPILEKMDGTEELLAKLNREDLLRKQRTFDNGSIPHQIHLGELHAILRRQEEFYPFLKENREKIEKILTFRIPYYVGPLARGNSRFAWMTRKSEETITPWNFEEVVDKGASAQSFIERMTNFDKNLPNEKVLPKHSLLYEYFTVYNELTKVKYVTEGMGKPEFLSGEQKKEIVDLLFKKNRKVTVKQLKEDYFKKIECFDSVEISGVEDRFNASLGTYHDLLKIIKDKDFLDNEENEDILEDIVLTLTLFEDREMIEERLKKYANLFDKKVMKQLKRRRYTGWGRLSRKLINGIRDKQSGKTILDFLKSDGFANRNFMQLIHDDSLTFKEEIEKAQVSGQGDSLHEQIANLAGSPAIKKGILQTVKVVDELVKVMGRHKPENIVIEMARENQTTQKGQKNSRERMKRIEEGIKELGSQILKEHPVENTQLQNEKLYLYYLQNGRDMYTGEELDINRLSDYDVDHIVPQSFLKDDSIDNKVLTRSKKARGKSDNVPSEEVVKKMKSYWRQLLKAKLITQRKFDNLTKAERGGLSELDKAGFIKRQLVETRQITKHVAQILDSRMNTKRDENDKLIRDVKVITLKSKLVSDFRKDFQFYKVREINNYHHAHDAYLNAVVGTALIKKYPKLESEFVYGDYKVYDVRKMIAKSEQEIGKATAKYFFYSNIMNFFKSEIKLANGEIRKRPLIETNEETGEIVWDKERDFATVRKVLSMPQVNIVKKTEVQTGGFSKESILPKRNSDKLIARKKDWDPKKYGGFDSPTVAYSVLVVAKIEKGKSKKLKTVKELLGITIMERSSFEKDPVAFLEAKGYKEVKKDLIIKLPKYSLFELENGRKRMLASAGELQKGNELALPSKYVNFLYLASHYEKLKGSPEDNEQKLLYVEQHKHYLDEIIDQISEFSKRVILADKNLEKVLSAYNEHRDKSIEEQAENIIHLFTLTNLGAPAAFKYFGTTIDRKRYTSTKEVLDATLIHQSITGLYETRIDLSQLGGD

SEQ ID NO: 15 - protein, 1368 aa, synthetic construct
MDKKYSIGLDIGTNSVGWAVITDEYKVPSKKFKVLGNTDRHSIKKNLIGALLFDSGETAEATRLKRTARRRYTRRKNRIRYLQEIFAEEMAKVDDSFFHRLEESFLVEEDKKHERHPIFGNIVDEVAYHEKYPTIYHLRKKLVDSDEKADLRLIYLALAHMIKFRGHFLIEGDLNSDNSDVQKLFIQLVQTYNQLFEENPINAEGVDAKAILSARLSKSRRLENLIAQLPGEKKNGLFGNLIALSLGLTPNFKSNFDLSEDAKLQLSKDTYDDDLENLLGQIGDQYADLFLAAKNLSDAILLSDILRVNTEITKAPLSASMIKRYDEHHQDLTLLKDLVRDQLPEKYKEIFFDQSKNGYAGYIDGGASQEEFYKYIKPILEKMDGTEELLEKLNREDLLRKQRTFDNGSIPHQIHLGELHAILRRQEEYYPFLKENREKIEKILTFRIPYYVGPLARGNSRFAWMTRKSDETITPWNFEEVVDKGASAQKFIERMTNFDKNLPNEKVLPKHSLLYEYFTVYNELTKVKYVTEGMRKPEFLSGEQKKEIVDLLFKKNRKVTVKQLKEYYFKKFECFDSVEISGVEDRFNASLGTYHDLLKIIKDKDFLDNEENEKILEDIVLTLTLFEDREMIKERLKKYANLFDKKVMKQLKRRRYTGWGRLSRKLINGIRDKQSGKTILDFLKEDGFANRNFMQLIHDDSLTFKEEIEKAQVIGKGESLHEHIANLAGSPAIKKGILQTVKVVDELVKVMGRHKPENIVIEMARENQTTQKGQKNSRERMKRIEEGIKELGSQILKEHPVENTQLQNEKLYLYYLQNGRDMYVDQELDINRLSDYDVDHIVPQSFLKDDSIDNKVLTRSDKARGKSDNVPSEEVVKKMKNYWRQLLNAKLITQRKFDNLTKAERGGLSELDKAGFIKRQLVETRQITKHVAQILDSRMNTKYDENDKLIRDVKVITLKSKLVSDFRKDFQFYKVREINNYHHAHDAYLNAVVGTALIKKYPKLESEFVYGDYKVYDVRKMIAKSEQEIGKATAKYFFYSNIMNFFKSEITLANGEIRKRPLIETNEETGEIVWDKEKDFATVRKVLSMPQVNIVKKTEVQTGGFSKESILPKRNSDKLIARKKDWDPKKYGGFDSPTVAYSVLVVAKVEKGKAKKLKTVKELLGITIMERSAFEKNPVAFLEAKGYQEVKKDLIIKLPKYSLFELENGRKRMLASAGELQKGNELALPSKYVNFLYLASHYEKLKGSPEDNEQKQLFVEQHKHYLDEIIDQISEFSKRVILADANLEKVKSAYEKHRDKSIEEQAENIIHLFTLTALGAPAAFKYFDTTIDRKRYTSTKEVLNATLIHQSITGLYETRIDLSQLGGD

SEQ ID NO: 16 - protein, 1368 aa, synthetic construct
MDKKYSIGLDIGTNSVGWAVITDEYKVPSKKFKVLGNTDRHSIKKNLIGALLFDSGETAEATRLKRTARRRYTRRKNRICYLQEIFSNEMAKVDDSFFHRLEESFLVEEDKKHERHPIFGNIVDEVAYHEKYPTIYHLRKKLADSTEKADLRLIYLALAHIIKFRGHFLIEGDLNSENSDVQKLFIQLVQTYNQLFEENPINEEGVDAKAILSAKLSKSRRLENLIAQFPGEKKNGLFGNLIALSLGLTPNFKSNFDLSEDAKLQLSKDTYDEDLDNLLAQIGDQYADLFLAAKNLSDAILLSDILTVNDEITKAPLSASMIKRYDEHHQDLTLLKALVRQQLPEKYKEIFFDESKNGYAGYIDGGASQEEFYKFIKPILEKMDGTEELLAKINREDFLRKQRTFDNGSIPHQIHLGELHAILRRQEEFYPFLKENREKIEKILTFRIPYYVGPLARGNSRFAWMTRKSDETITPWNFEEVVDKGASAQAFIERMTNFDKNLPTEKVLPKHSLLYEYFTVYNELTKVKYVTEGMGKPEFLSGEQKKEIVDLLFKKNRKVTVKQLKEDYFKKIECFDSVEISGVEDRFNASLGTYHDLLKIIKDKDFLDNEENEDILEDIVLTLTLFEDREMIEERLKKYAHLFDKKVLKQLKRRRYTGWGRLSKKLINGIRDKQSGKTILDFLKSDGFANRNFMQLIHDDSLTFKEAIKKAQVSGQGDSLHEHIANLAGSPAIKKGILQTVKVVDELVKVMGRHKPENIVIEMARENQTTQKGQKNSRERMKRIEEAIKELGSQILKEHPVENTQLQNDKLYLYYLQNGKDMYTGEELDIDRLSDYDVDHIIPQSFIKDDSIDNKVLTSSKKARGKSDDVPSEEVVKKMKNYWRQLLNAKLISQRKFDNLTKAERGGLSELDKAGFIKRQLVETRQITKHVAQILDSRMNTKYDENDKLIREVKVITLKSKLVSDFRKDFQFYKVREINNYHHAHDAYLNAVVGTALIKKYPKLESEFVYGDYKVYDVRKMIAKSEQEIGKATAKYFFYSNIMNFFKTEITLANGEIRKRPLIETNGETGEIVWDKGRDFATVRKVLSMPQVNIVKKTEVQTGGFSKESILPKRESDKLIARKKDWDTKKYGGFDSPTVAYSVLVVAKVEKGKAKKLKTVKELVGITIMERSSFEKDPVAFLEDKGYKDIQKDLIIKLPKYSLFELENGRKRLLASAGELQKGNELALPQKYVTFLYHASHYEKLKGSPEDNEKKLLYVEQHKNYFDEILDQISEFSKRYILADKNLEKIKSLYNENEDYSIEELAESFINLFTLTALGAPAAFKFFDTTIDRKRYTSTKEILDATLIHQSITGLYETRIDLSQLGGD

SEQ ID NO: 17 - protein, 1368 aa, synthetic construct
MDKKYSIGLDIGTNSVGWAVITDEYKVPSKKFKVLGNTDRHSIKKNLIGALLFDSGETAEATRLKRTARRRYTRRKNRICYLQEIFSNEMAKVDDSFFHRLEESFLVEEDKKHERHPIFGNIVDEVAYHEKYPTIYHLRKELADSTEKADLRLIYLALAHIIKFRGHFLIEGDLNSDNSDVQKLFIQLVQTYNQLFEENPLNESGVDAKAILSAKLSKSRRLENLIAQFPGEKRNGLFGNLIALSLGLTPNFKSNFDLAEDAKLQLSKDTYDEDLDNLLAQIGDQYADLFLAAKNLSDAILLSGILTVNDEITKAPLSASMIKRYDEHHQDLTLLKALVRQQLPEKYKEIFFDESKNGYAGYIDGGASQEEFYKYIKPILEKMDGTEELLAKLNREDFLRKQRTFDNGSIPHQIHLGELHAILRRQEDYYPFLKENREKIEKILTFRIPYYVGPLARGNSRFAWMTRKSDETITPWNFEEVVDKEASAQAFIERMTNFDKNLPTEKVLPKHSLLYEYFTVYNELTKVKYVTEGMGKPEFLSGEQKQEIVDLLFKKNRKVTVKQLKEDLFKEIECFDSVEISGVEDRFNASLGTYHDLLKIIKDKDFLDNEENEDILEDIVLTLTLFEDREMIEERLKKYADLFDDKVLKKLKRRRYTGWGRLSRKLINGIRDKQSGKTILDFLKSDGFANRNFMQLIHDDSLTFKEEIQKAQVKGQGDSLHEHIANLAGSPAIKKGILQTVKVVDELVKVMGRHKPENIVIEMARENQTTQKGQKNSRERMKRIEEGIKELGSQILKEHPVENTQLQNDKLYLYYLQNGKDMYTGEELDIDRLSDYDVDHIIPQSFIKDDSIDNKVLTSSKKARGKSDDVPSEEVVKKMKSYWRQLLKAKLISQRKFDNLTKAERGGLSELDKAGFIKRQLVETRQITKHVAQILDSRMNTKYDENDKLIREVKVITLKSKLVSDFRKDFQFYKVREINNYHHAHDAYLNAVVGTALIKKYPKLESEFVYGDYKVYDVRKMIAKSEQEIGKATAKYFFYSNIMNFFKTEITLANGEIRKRPLIETNGETGEIVWDKGRDFATVRKVLSMPQVNIVKKTEVQTGGFSKESILPKRESDKLIARKKDWDTKKYGGFDSPTVAYSVLVVAKVEKGKSKKLKTVKELVGITIMERSSFEKNPIDFLEAKGYKNVQKDLIIKLPKYSLFELENGRKRLLASAGELQKGNELALPSKYVTFLYLASHYEKLKGSPEDNEQKQLFVEQHKHYFDEILDQISEFSERYILADKNLDKILSLYNENRDYSIEEQAENFINLFTLTNLGAPAAFKFFGTTIDRKRYTSTKEILDATLIHQSITGLYETRIDLSQLGGD

SEQ ID NO: 18 - protein, 1368 aa, synthetic construct
MDKKYSIGLDIGTNSVGWAVITDEYKVPSKKFKVLGNTDRHSIKKNLIGALLFDSGETAEATRLKRTARRRYTRRKNRICYLQEIFSNEMAKVDDSFFHRLEESFLVEEDKKHERHPIFGNIVDEVAYHEKYPTIYHLRKKLADSDEKADLRLIYLALAHMIKFRGHFLIEGDLNSDNSDVQKLFIQLVQTYNQLFEENPINEEGVDAKAILSARLSKSRRLENLIAQFPGEKKNGLFGNLIALSLGLTPNFKSNFDLAEDAKLQLSKDTYDDDLENLLGQIGDQYADLFLAAKNLSDAILLSDILTVNSEITKAPLSASMVKRYDEHHQDLTLLKALVRQQLPEKYKEIFFDQSKNGYAGYIDGGASQEEFYKYIKPILEKMDGTEEFLAKINREDFLRKQRTFDNGSIPHQIHLGELHAILRRQEKYYPFLKENREKIEKILTFRIPYYVGPLARGNSRFAWMTRKSDETITPWNFEEVVDKEASAQAFIERMTNFDKNLPNEKVLPKHSLLYEYFTVYNELTKVKYVTEGMRKPEFLSGEQKQEIVDLLFKKNRKVTVKQLKEDYFKKIECFDSVEISGVEDRFNASLGTYHDLLKIIKDKDFLDNEENEDILEDIVLTLTLFEDREMIEERLKKYANLFDDKVLKQLKRRRYTGWGRLSRKLINGIRDKQSGKTILDFLKSDGFANRNFMQLIHDDSLTFKEEIEKAQVSGQGDSLHEHIANLAGSPAIKKGILQTVKVVDELVKVMGRHKPENIVIEMARENQTTQKGQKNSRERMKRIEEGIKELGSQILKEHPVENTQLQNEKLYLYYLQNGRDMYVDQELDINRLSDYDVDHIVPQSFLKDDSIDNKVLTRSDKARGKSDNVPSEEVVKKMKNYWRQLLNAKLITQRKFDNLTKAERGGLSELDKAGFIKRQLVETRQITKHVAQILDSRMNTKYDENDKLIREVKVITLKSKLVSDFRKDFQFYKVREINNYHHAHDAYLNAVVGTALIKKYPKLESEFVYGDYKVYDVRKMIAKSEQEIGKATAKYFFYSNIMNFFKTEITLANGEIRKRPLIETNGETGEIVWDKGRDFATVRKVLSMPQVNIVKKTEVQTGGFSKESILPKRNSDKLIARKKDWDTKKYGGFDSPTVAYSVLVVAKVEKGKAKKLKTVKELVGITIMERSSFEKNPIAFLEAKGYKEVKKDLIIKLPKYSLFELENGRKRLLASAGELQKGNELALPSKYVTLLYLASHYEKLKGSPEDNEQKQLFVEQHKHYFDEIIDQISEFSKRYILADANLEKIKSLYEKNRDKSIEEQAENFIHLLTFTALGAPAAFKFFDTTIDRKRYTSTKEILNATLIHQSITGLYETRIDLSQLGGD

SEQ ID NO: 19 - protein, 1368 aa, synthetic construct
MKKKYSIGLDIGTNSVGWAVITDEYKVPSKKFKVLGNTDRQSIKKNLLGALLFDSGETAEATRLKRTARRRYTRRKNRIRYLQEIFAEEMAKVDDSFFHRLEESFLVEEDKKHERHPIFGNIVDEVAYHEKYPTIYHLRKKLADSTEKADLRLIYLALAHMIKFRGHFLIEGDLNPDNSDVDKLFIQLVQTYNQLFEENPINEEGVDAKAILSARLSKSRRLENLIAQLPGEKKNGLFGNLIALSLGLTPNFKSNFDLAEDAKLQLSKDTYDDDLDNLLAQIGDQYADLFLAAKNLSDAILLSDILTVNSEITKAPLSASMIKRYDEHHQDLTLLKALVRQQLPEKYKEIFFDKSKNGYAGYIDGGASQEEFYKFIKPILEKMDGTEELLAKLNREDLLRKQRTFDNGSIPHQIHLGELHAILRRQEDFYPFLKENREKIEKILTFRIPYYVGPLARGNSRFAWMTRKSEETITPWNFEEVVDKGASAQSFIERMTNFDKNLPNEKVLPKHSLLYEYFTVYNELTKVKYVTEGMRKPEFLSGEQKQAIVDLLFKKNRKVTVKQLKEDYFKKIECFDSVEISGVEDRFNASLGTYHDLLKIIKDKEFLDNEENEDILEDIILTLTLFEDKEMIEERLKKYANLFDDKVLKQLKRRRYTGWGRLSRKLINGIRDKQSGKTILDFLKSDGFANRNFMQLIHDDSLTFKEEIKKAQVSGQGDSLHEQIANLAGSPAIKKGILQTVKIVDELVKVMGRHKPENIVIEMARENQTTQKGQKNSRERMKRIEEGIKELGSQILKEHPVENTQLQNEKLYLYYLQNGKDMYTGQELDIDRLSDYDVDHIIPQSFIKDDSIDNKVLTSSKKARGKSDNVPSEEVVKKMKNYWRQLLNAKLISQRKFDNLTKAERGGLSELDKAGFIKRQLVETRQITKHVAQILDSRMNTKRDENDKLIRDVKIITLKSKLVSDFRKDFQFYKVREINNYHHAHDAYLNAVVGTALIKKYPKLESEFVYGDYKVYDVRKMIAKSEQEIGKATAKRFFYSNIMNFFKTEITLANGEIRKRPLIETNEETGEIVWDKEKDFATVRKVLSMPQVNIVKKTEVQTGGFSKESILPKRESDKLIARKKDWDPKKYGGFDSPTVAYSVLVVAKVEKGKAKKLKSVKELVGITIMERSSFEKDPVAFLEAKGYKEIQKDLIIKLPKYSLFELENGRKRMLASAGELQKGNELALPSKYVTFLYLASHYEKLKGSPEDNEQKQLFVEQHKHYLDEILDQISEFSERYILADKNLDKILSLYNKHRDKSIEEQAENIINLFTLTNLGAPAAFKFFDTTIDRKRYTSTKEILNATLIHQSITGLYETRIDLSQLGGD

SEQ ID NO: 20 - protein, 1368 aa, synthetic construct
MDKKYSIGLDIGTNSVGWAVITDEYKVPSKKFKVLGNTDRQSIKKNLLGALLFDSGETAEATRLKRTARRRYTRRKNRIRYLQEIFANEMAKVDDSFFHRLEESFLVEEDKRHERHPIFGNIVDEVAYHEKYPTIYHLRKELADSTEKADLRLIYLALAHMIKFRGHFLIEGDLNSDNSDVDKLFIQLVQTYNQLFEENPINESGVDAKAILSAKLSKSRRLENLIAQLPGEKKNGLFGNLIALSLGLTPNFKSNFDLSEDAKLQLSKDTYDDDLDNLLAQIGDQYADLFLAAKNLSDAILLSDILTVNSEITKAPLSASMIKRYDEHHQDLTLLKALVRQQLPEKYKEIFFDESKNGYAGYIDGGASQEEFYKFIKPILEKMDGTEELLAKLNREDFLRKQRTFDNGSIPHQIHLGELHAILRRQEDFYPFLKENREKIEKILTFRIPYYVGPLARGNSRFAWMTRKSDETITPWNFEEVVDKGASAQAFIERMTNFDKNLPNEKVLPKHSLLYEYFTVYNELTKVKYVTEGMRKPEFLSGEQKKEIVDLLFKKNRKVTVKQLKEDYFKKIECFDSVEISGVEDRFNASLGTYHDLLKIIKDKDFLDNEENEDILEDIVLTLTLFEDKEMIEERLKKYANLFDDKVLKQLKRRRYTGWGRLSKKLINGIRDKQSGKTILDFLKSDGFANRNFMQLIHDDSLTFKEEIQKAQVSGQGDSLHEQIANLAGSPAIKKGILQTVKIVDELVKVMGRHKPENIVIEMARENQTTQKGQKNSRERMKRLEEGLKELGSQILKEHPVENTQLQNDKLYLYYLQNGKDMYTGQELDIDRLSDYDVDHIIPQSFIKDDSIDNKVLTSSDKARGKSDNVPSEEVVKKMKSYWRQLLNAKLISQRKFDNLTKAERGGLSELDKAGFIKRQLVETRQITKHVAQILDSRFNTERDENDKLIREVKIITLKSKLVSDFRKDFQFYKVREINNYHHAHDAYLNAVVGTALIKKYPKLESEFVYGDYKVYDVRKMIAKSEQEIGKATAKRFFYSNIMNFFKTEIKLANGEIRKRPLIETNEETGEIVWDKEKDFATVRKVLSMPQVNIVKKTEVQTGGFSKESILPKRNSDKLIARKKDWDTKKYGGFDSPTVAYSVLVVAKVEKGKTKKLKTVKELVGITIMERSSFEKDPVAFLEKKGYKEIQKDLIIKLPKYSLFELENGRKRMLASAGELQKGNELALPSKYVTFLYLASHYEKLKGSPEDNEQKQLFVEQHKDYFDEIIEQISEFSKRYILADKNLEKILSLYNKNSDKPIEEQAESIINLFTLTNLGAPAAFKFFDTTIDRKRYTSTKEILDATLIHQSITGLYETRIDLSQLGGD

SEQ ID NO: 21 - protein, 1368 aa, synthetic construct
MDKKYSIGLDIGTNSVGWAVITDEYKVPSKKFKVLGNTDRHSIKKNLLGALLFDSGETAEATRLKRTARRRYTRRKNRIRYLQEIFSEEMAKVDDSFFHRLEESFLVEEDKKHERHPIFGNIVDEVAYHEKYPTIYHLRKYLADSPEKADLRLIYLALAHIIKFRGHFLIEGDLNSDNSDVQKLFIQLVQTYNQLFEESPLNAEGVDAKAILSARLSKSRRLENLIAQIPGEKKNGLFGNLIALSLGLTPNFKSNFDLAEDAKLQLSKDTYDDDLENLLAQIGDQYADLFLAAKNLSDAILLSGILTVNDEITKAPLSASMIKRYDEHHQDLTLLKALIRQQLPEKYKEIFFDQSKNGYAGYIDGGASQEEFYKYLKPILEKLDGSEEFLAKIEREDFLRKQRTFDNGSIPHQIHLGELHAILRRQEKYYPFLKDNREKIEKILTFRIPYYVGPLARGNSRFAWMTRKSDETITPWNFEEVVDKEASAQAFIERMTNFDKNLPNEKVLPKHSLLYEKFTVYNELTKVKYVTEGMRKPEFLSAEQKQEIVDLLFKKNRKVTVKQLKEFYFKEIECFDIVEISGVEDRFNASLGTYHDLLKIIKDKDFLDNEENEDILEDIVLTLTLFEDREMIEERLKKYANLFDKKVLKKLKRRRYTGWGRLSAKLINGIRDKQSGKTILDFLKADGFANRNFMQLIHDDSLTFKEEIKKAQVIGQGESLHELIANLAGSPAIKKGILQTIKIVDELVKVMGRHKPENIVIEMARENQTTQKGQKNSRERMKRIEEAIKELGSQILKEHPVENTQLQNEKLYLYYLQNGKDMYTGEELDIDRLSDYDVDHIVPQSFLKDDSIDNKVLVSSEKARGKSDNVPSEEVVKKMKSYWSKLLDAKLITQRKFDNLTKAERGGLTELDKAGFIKRQLVETRQITKHVAQILDSRFNTKYDENDKLIRDVKIITLKSKLVSDFRKDFQLYKVREINNYHHAHDAYLNAVVGTALIKKYPKLESEFVYGDYKVYDVRKMIAKSEQEIGKATAKMFFYSNIMNFFKSEISLANGEIRKRPLIETNEETGEIVWDKGKDFATVRKVLSMPQVNIVKKTEVQTGGFSKESILPKRNSDKLIARKKDWDTKKYGGFDSPTVAYSVLVIAKVEKGKAKKLKTVKELVGITIMERSSFEKNPIAFLEDKGYKEIKKDLIIKLPKYSLFELENGRKRLLASAGELQKGNELALPNKYVTFLYLASHYEKLKGSEEDNEQKQNFVEQHKHYFDEIIEQISEFSKRYILADANLEKILSLYEKNRDLSIEEQAESFINLFTFTALGAPAAFKFFDTTIDRKRYTSTKEVLNATLIHQSITGLYETRIDLSQLGGD

SEQ ID NO: 22 - protein, 1368 aa, synthetic construct
MKKKYSIGLDIGTNSVGWAVITDDYKVPSKKFKVLGNTDRQSIKKNLIGALLFDSGETAEATRLKRTARRRYTRRKNRIRYLQEIFAEEMAKVDDSFFQRLEESFLVEEDKKHERHPIFGNIVDEVAYHEKYPTIYHLRKKLVDSTEKADLRLIYLALAHMIKFRGHFLIEGDLNSENSDVQKLFIQLVQTYNQLFEENPINESGVDAKAILSARLSKSRRLENLIAQIPGEKKNGLFGNLIALSLGLTPNFKSNFDLAEDAKLQLSKDTYDDDLDNLLAQIGDQYADLFLAAKNLSDAILLSDILRVNTEITKAPLSASMIKRYDEHHQDLTLLKALVRQQLPEKYKEIFFDKSKNGYAGYIDGGASQEEFYKFIKPILEKMDGTEELLAKLNREDLLRKQRTFDNGSIPHQIHLGELHAILRRQEEFYPFLKENREKIEKILTFRIPYYVGPLARGNSRFAWMTRKSDETITPWNFEEVVDKGASAQSFIERMTNFDENLPNEKVLPKHSLLYEYFTVYNELTKVKYVTEGMGKPEFLSGEQKKEIVDLLFKKNRKVTVKQLKEDYFKKIECFDSVEISGVEDRFNASLGTYHDLLKIIKDKDFLDNEENEDILEDIVLTLTLFEDREMIEERLKKYANLFDDKVMKQLKRRRYTGWGRLSRKLINGIRDKQSGKTILDFLKSDGFANRNFMQLIHDDSLTFKEEIKKAQVKGQGDSLHEQIANLAGSPAIKKGILQTVKVVDELVKVMGRHKPENIVIEMARENQTTQKGQKNSRERMKRIEEGIKELGSQILKEHPVENAQLQNDKLYLYYLQNGRDMYTGEELDINRLSQYDVDHIVPQSFLKDDSIDNKVLTRSEKARGKSDNVPSEEVVKKMKSYWRQLLNAKLITQRKFDNLTKAERGGLSELDKAGFIKRQLVETRQITKHVAQILDSRMNTKRDENDKLIRDVKVITLKSKLVSDFRKDFQFYKVREINNYHHAHDAYLNAVVGTALIKKYPKLESEFVYGDYKKYDVRKMIAKSEQEIGKATAKYFFYSNIMNFFKSEIKLANGEIRKRPLIETNEETGEIVWDKERDFATVRKVLSMPQVNIVKKTEVQTGGFSKESILPKRESDKLIARKKGWDPKKYGGFDSPTVAYSVLVVAKVEKGKSKKLKTVKELLGITIMERSSFEKDPVDFLEAKGYKEVKKDLIIKLPKYSLFELENGRKRMLASAGELQKGNELALPSKYVNFLYLASHYEKLKGKPEDNEQKQLYVEQHKHYLDEIIDQISEFSKRVILADKNLEKVLSAYNNHRDKSIREQAENIIHLFTLTNLGAPAAFKYFDTTIDRKRYTSTKEVLDATLIHQSITGLYETRIDLSQLGGD

SEQ ID NO: 23 - protein, 1368 aa, synthetic construct
MDKKYSIGLDIGTNSVGWAVITDEYKVPSKKFKVLGNTDRHSIKKNLIGALLFDSGETAEATRLKRTARRRYTRRKNRICYLQEIFSNEMAKVDDSFFHRLEESFLVEEDKKHERHPIFGNIVDEVAYHEKYPTIYHLRKKLADSTEKADLRLIYLALAHIIKFRGHFLIEGDLNSDNSDVDKLFIQLVQTYNQLFEENPINESGVDAKAILSAKLSKSRRLENLIAQFPGEKRNGLFGNLIALSLGLTPNFKSNFDLAEDAKLQLSKDTYDEDLENLLAQIGDQYADLFLAAKNLSDAILLSDILTVNSEITKAPLSASMIKRYDEHHQDLTLLKALVRQQLPEKYKEIFFDKSKNGYAGYIDGGASQEEFYKYIKPILEKMDGTEEFLAKINREDFLRKQRTFDNGSIPHQIHLGELHAILRRQEEYYPFLKENREKIEKILTFRIPYYVGPLARGNSRFAWMTRKSDETITPWNFEEVVDKGASAEAFIERMTNFDKNLPSEKVLPKHSLLYEYFTVYNELTKVKYVTEGMGKPHFFDGNVKQEIVDLLFKKDRKVTKKKLLDFLFKEIDEFRIVDISGVEDAFNASLGTYHDLLKIIKDKDFLDNEENEDILEDIVLTLTLFEDKEMIEERLKKYANLFDKKVLKQLKRRRYTGWGRLSRKLINGIRDKQSGKTILDFLKSDGFANRNFMQLIHDDSLTFKEAIKKAQVSGQGDSLHEHIANLAGSPAIKKGILQTVKVVDELVKVMGRHKPENIVIEMARENQTTQKGQKNSRERMKRIEEGIKELGSQILKEHPVENTQLQNEKLYLYYLQNGRDMYVDQELDINRLSDYDVDHIVPQSFLKDDSIDNKVLTRSDKARGKSDNVPSEEVVKKMKNYWRQLLNAKLITQRKFDNLTKAERGGLSELDKAGFIKRQLVETRQITKHVAQILDSRMNTKYDENDKLIREVKVITLKSKLVSDFRKDFQFYKVREINNYHHAHDAYLNAVVGTALIKKYPKLESEFVYGDYKVYDVRKMIAKSEQEIGKATAKYFFYSNIMNFFKTEITLANGEIRKRPLIETNGETGEIVWDKGRDFATVRKVLSMPQVNIVKKTEVQTGGFSKESILPKRNSDKLIARKKDWDPKKYGGFDSPTVAYSVLVVAKVEKGKSKKLKSVKELLGITIMERSSFEKNPIDFLEAKGYKEVKKDLIIKLPKYSLFELENGRKRMLASAGELQKGNELALPSKYVNFLYLASHYEKLKGSPEDNEQKQLFVEQHKHYLDEIIEQISEFSKRVILADANLDKVLSAYNKHRDKPIREQAENIIHLFTLTNLGAPAAFKYFDTTIDRKRYTSTKEVLDATLIHQSITGLYETRIDLSQLGGD

SEQ ID NO: 24 - protein, 1368 aa, synthetic construct
MDKKYSIGLDIGTNSVGWAVITDEYKVPSKKFKVLGNTDRHSIKKNLIGALLFDSGETAEATRLKRTARRRYTRRKNRICYLQEIFSNEMAKVDDSFFHRLEESFLVEEDKRNERHPIFGNIVEEVAYHEKYPTIYHLRKHLADSDEKADLRLVYLALAHIIKFRGHFLIEGDLNAENSDVQKLFKELLEAYNQTFEESPLEEITVDAEAILTEKLSKSRRLENLIAEFPGEKKNGLFGNLVALSLGLTPNFKSNFDLSEDAKLQFSKDTYDEDLEELLGQIGDEYADLFVAAKNLYDAILLSGILTVKDSSTKAPLSASMVKRYDEHHQDLTLLKNFVRKQLPEKYKEIFFDQSKNGYAGYIDGGASQEEFYKYLKKLLEKIDGSEYFLDKIEREDFLRKQRTFDNGSIPHQIHLQELKAIIRRQEKYYPFLKENQEKIEKILTFRIPYYVGPLARGNSRFAWASRKSDETITPWNFDEVVDKEKSAEKFIERMTNFDKNLPEEKVLPKHSLLYEKFTVYNELTKVKYVTEGGKKPEFFDANMKQEIFDNVFKKYRKVTKKQLLDYLAKEFDEFRIVDISGVEDRFNASLGTYHDLKKILGDKDFLDNDDNEKILEDIIKTLTLFEDREMIKKRLEKYSDLFDKKQLKKLERRRYTGWGRLSAKLINGIRDKESGKTILDYLIDDGFTNRNFMQLIHDDNLTFKEEIAKAQVIGKGDSLHEHIANLAGSPAIKKGILQTVKVVDELVKVMGRHKPENIVIEMARENQTTQKGQKNSRERMKRIEEGIKELGSQILKEHPVENTQLQNEKLYLYYLQNGRDMYVDQELDINRLSDYDVDHIVPQSFLKDDSIDNKVLTRSDKARGKSDNVPSEEVVKKMKNYWRQLLNAKLITQRKFDNLTKAERGGLSELDKAGFIKRQLVETRQITKHVAQILDSRMNTKYDENDKLIREVKVITLKSKLVSDFRKDFQFYKVREINNYHHAHDAYLNAVVGTALIKKYPKLESEFVYGDYKVYDVRKMIAKSEQEIGKATAKYFFYSNIMNFFKTEITLANGEIRKRPLIETNGETGEIVWDKGRDFATVRKVLSMPQVNIVKKTEVQTGGFSKESILPKRNSDKLIARKKDWDPKKYGGFDSPTVAYSVLVVAKVEKGKSKKLKSVKELLGITIMERSSFEKNPIDFLEAKGYKEVKKDLIIKLPKYSLFELENGRKRMLASAGELQKGNELALPSKYVNFLYLASHYEKLKGSPEDNEQKQLFVEQHKHYLDEIIEQISEFSKRVILADANLDKVLSAYNKHRDKPIREQAENIIHLFTLTNLGAPAAFKYFDTTIDRKRYTSTKEVLDATLIHQSITGLYETRIDLSQLGGD

SEQ ID NO: 25 - protein, 1368 aa, synthetic construct
MDKKYSIGLDIGTNSVGWAVITDEYKVPSKKFKVLGNTDRHSIKKNLIGALLFDSGETAEATRLKRTARRRYTRRKNRIRYLQEIFAEEMAKVDDSFFHRLEESFLVEEDKKNERHPIFGNIVDEVAYHEKYPTIYHLRKKLADSDEKADLRLIYLALAHIIKFRGHFLIEGDLNSDNSDVQKLFIQLVQTYNQLFEESPINEEGVDAKAILTAKLSKSRRLENLIAQFPGEKKNGLFGNLIALSLGLTPNFKSNFDLAEDAKLQFSKDTYDDDLENLLGQIGDQYADLFLAAKNLSDAILLSDILTVNSEITKAPLSASMVKRYDEHHQDLTLLKKLVRQQLPEKYKEIFFDQSKNGYAGYIDGGASQEEFYKYIKPILEKVDGSEELLAKIEREDFLRKQRTFDNGSIPHQIHLGELHAILRRQEKYYPFLKENREKIEKILTFRIPYYVGPLARGNSRFAWMSRKSEETITPWNFEEVVDKEASAQSFIERMTNFDKNLPNEKVLPKHSLLYEKFTVYNELTKVKYVTEGMRKPEFLSAEQKQEIVDLLFKKNRKVTVKQLKEDYFKKIECFDSVEISGVEDRFNASLGTYHDLLKIIKDKDFLDNEENEDILEDIVLTLTLFEDREMIEERLKKYAHLFDKKVLKQLKRRRYTGWGRLSRKLINGIRDKQSGKTILDFLIDDGFANRNFMQLIHDDSLTFKEEIEKAQVIGQGESLHELIANLAGSPAIKKGILQTVKIVDELVKVMGRHKPENIVIEMARENQTTQKGQKNSRERMKRIEEGIKELGSQILKEHPVENTQLQNEKLYLYYLQNGRDMYVDQELDINRLSDYDVDHIVPQSFLKDDSIDNKVLTRSDKARGKSDNVPSEEVVKKMKNYWRQLLNAKLITQRKFDNLTKAERGGLSELDKAGFIKRQLVETRQITKHVAQILDSRFNTKYDENDKLIRDVKIITLKSKLVSDFRKDFQLYKVREINNYHHAHDAYLNAVVGTALIKKYPKLESEFVYGDYKVYDVRKMIAKSEQEIGKATAKYFFYSNIMNFFKTEITLANGEIRKRPLIETNEETGEIVWDKGKDFATVRKVLSMPQVNIVKKTEVQTGGFSKESILPKRNSDKLIARKKDWDPKKYGGFDSPTVAYSVLVVAKVEKGKAKKLKTVKELVGITIMERSSFEKNPIAFLEAKGYKEVKKDLIIKLPKYSLFELENGRKRLLASAGELQKGNELALPNKYVTLLYLASHYEKLKGSPEDNEEKQLFVEQHKHYFDEIIEQISEFSKRYILADANLEKILSLYEKNRDKSIEEQAENFIHLFTFTALGAPAAFKFFDTTIDRKRYTSTKEILNATLIHQSITGLYETRIDLSQLGGD

SEQ ID NO: 26 - protein, 1368 aa, synthetic construct
MDKKYSIGLDIGTNSVGWAVITDEYKVPSKKFKVLGNTDRHSIKKNLIGALLFDSGETAEATRLKRTARRRYTRRKNRICYLQEIFSNEMAKVDDSFFHRLEESFLVEEDKKHERHPIFGNIVDEVAYHEKYPTIYHLRKKLADSTEKADLRLIYLALAHMIKFRGHFLIEGDLNSDNSDVDKLFIQLVQTYNQLFEEDPINESGVDAKAILSAKLSKSRRLENLIAQFPGEKKNGLFGNLIALSLGLTPNFKSNFDLAEDAKLQLSKDTYDEDLENLLAQIGDQYADLFLAAKNLSDAILLSDILTVNSEITKAPLSASMIKRYDEHHQDLTLLKALVRQQLPEKYKEIFFDESKNGYAGYIDGGASQEEFYKYIKPILEKMDGTEELLAKLNREDFLRKQRTFDNGSIPHQIHLGELHAILRRQEDFYPFLKENREKIEKILTFRIPYYVGPLARGNSRFAWMTRKSEETITPWNFEEVVDKGASAQAFIERMTNFDKNLPNEKVLPKHSLLYEYFTVYNELTKVKYVTEGMRKPEFLSGEQKKEIVDLLFKKNRKVTVKQLKEDYFKKIECFDSVEISGVEDRFNASLGTYHDLLKIIKDKDFLDNEENEDILEDIVLTLTLFEDREMIEERLKKYANLFDDKVLKQLKRRRYTGWGRLSKKLINGIRDKQSGKTILDFLKSDGFANRNFMQLIHDDSLTFKEEIKKAQVKGQGDSLHEHIANLAGSPAIKKGILQTVKVVDELVKVMGRHKPENIVIEMARENQTTQKGQKNSRERMKRLEEGIKELGSQILKEHPVENTQLQNDKLYLYYLQNGKDMYTGDELDIDRLSDYDVDHIIPQSFIKDDSIDNKVLTSSDKARGKSDNVPSEEVVKKMKSYWRQLLNAKLISQRKFDNLTKAERGGLSELDKAGFIKRQLVETRQITKHVAQILDSRMNTKYDENDKLIREVKVITLKSKLVSDFRKDFQFYKVREINNYHHAHDAYLNAVVGTALIKKYPKLESEFVYGDYKVYDVRKMIAKSEQEIGKATAKYFFYSNIMNFFKTEITLANGEIRKRPLIETNGETGEIVWDKGRDFATVRKVLSMPQVNIVKKTEVQTGGFSKESILPKRNSDKLIARKKDWDTKKYGGFDSPTVAYSVLVVAKVEKGKSKKLKTVKELVGITIMERSSFEKDPVAFLEAKGYKNIQKDLIIKLPKYSLFELENGRKRLLASAGELQKGNELALPSKYVTFLYLASHYEKLKGSPEDNEKKRLYVEQHKHYFDEIVDQISEFSKRYILADKNLEKILSLYNNNRDKSINEQAENFINLFTLTALGAPAAFKFFDTTIDRKRYTSTKEILNSTLIHQSITGLYETRIDLSQLGGD

SEQ ID NO: 27 - protein, 1368 aa, synthetic construct
MDKKYSIGLDIGTNSVGWAVITDEYKVPSKKFKVLGNTDRHSIKKNLIGALLFDSGETAEATRLKRTARRRYTRRKNRICYLQEIFSNEMAKVDDSFFHRLEESFLVEEDKKNERHPIFGNIVDEVAYHKKYPTIYHLRKKLADSDEKADLRLIYLALAHMIKFRGHFLIEGDLNSDNSDVQKLFIQLVQTYNQLFEENPINEEGVDAKAILSERLSKSRRLENLIAQFPGEKKNGLFGNLIALSLGLTPNFKSNFDLAEDAKLQLSKDTYDEDLENLLGQIGDQYADLFLAAKNLSDAILLSDILTVNDEITKAPLSASMVKRYDEHHKDLKLLKELVRQQLPEKYKEIFSDKSKNGYAGYIDGKTSQEEFYKYIKPILEKVDGSEEFLDKINREDFLRKQRTFDNGSIPHQIHLGELHAILRRQEKYYPFLKENREKIEKILTFRIPYYVGPLARGNSRFAWMTRKSDEKITPWNFDEVVDKEASAQKFIERMTNNDLYLPDEKVLPKHSLLYEYFTVYNELTKVKYVTEGMRKPEFLSGEQKQEIVDLLFKKNRKVTVKKLKEYYFKKIECFDSVEISGVDDRFNASLGTYHDLLKIIKDKDFLDNEENEDILEDIVLTLTLFEDREMIKKRLEKYADLFDKKQLKQLKRRHYTGWGRLSRKLINGIRDKQSGKTILDFLISDGFANRNFMQLIHDDSLTFKEEIQKAQVIGDGDSLHEHIANLAGSPAIKKGILQTVKVVDELVKVMGRHKPENIVIEMARENQTTQKGQRNSRQRLKRLEEGIKELGSNILKENPVENTQLQNDRLYLYYLQNGKDMYTGEELDIDRLSQYDIDHIIPQSFIKDDSIDNKVLVSSAEARGKSDNVPSEEVVKKMKGYWRKLLEAGLISQRKFDNLTKAERGGLSELDKAGFIKRQLVETRQITKHVAQILDSRMNTKYDENDKLIREVKVITLKSKLVSDFRKDFQFYKVREINNYHHAHDAYLNAVVGTALIKKYPKLESEFVYGDYKVYDVRKMIAKSEQEIGKATAKYFFYSNIMNFFKTEITLANGEIRKRPLIETNGETGEIVWDKGRDFATVRKVLSMPQVNIVKKTEVQTGGFSKESILPKRNSDKLIARKKDWDPKKYGGFDSPTVAYSVLVVAKVEKGKSKKLKSVKELLGITIMERSSFEKNPIDFLEAKGYKEVKKDLIIKLPKYSLFELENGRKRMLASAGELQKGNELALPSKYVNFLYLASHYEKLKGSPEDNEQKQLFVEQHKHYLDEIIEQISEFSKRVILADANLDKVLSAYNKHRDKPIREQAENIIHLFTLTNLGAPAAFKYFDTTIDRKRYTSTKEVLDATLIHQSITGLYETRIDLSQLGGD

SEQ ID NO: 28 - protein, 1368 aa, synthetic construct
MDKKYSIGLDIGTNSVGWAVITDEYKVPSKKFKVLGNTDRHSIKKNLIGALLFDSGETAEATRLKRTARRRYTRRKNRICYLQEIFSNEMAKVDDSFFHRLEESFLVEEDKKHERHPIFGNIVDEVAYHEKYPTIYHLRKKLADSTEKADLRLIYLALAHMIKFRGHFLIEGDLNSDNSDVQKLFIQLVQTYNQLFEENPINEEGVDAKAILSAKLSKSRRLENLIAQLPGEKRNGLFGNLIALSLGLTPNFKSNFDLAEDAKLQLSKDTYDEDLENLLGQIGDQYADLFLAAKNLSDAILLSDILTVNSEITKAPLSASMIKRYDEHHQDLTLLKALVREQLPEKYKEIFFDETKNGYAGYIDGGASQEEFYKYIKPILEKMDGTEEFLAKINREDFLRKQRTFDNGSIPHQIHLGELHAILRRQEEFYPFLKENREKIEKILTFRIPYYVGPLARGNSRFAWMTRKSEETITPWNFEEVVDKGASAQAFIERMTNFDKNLPNEKVLPKHSLLYEYFTVYNELTKVKYVTEGMGKPEFFSGEQKQEIVDLLFKKNRKVTVKQLKEDYFKKIECFDSVEISGVEDRFNASLGTYHDLLKIIKDKDFLDNEENEDILEDIVLTLTLFEDREMIEERLKKYADLFDDKVLKQLKRRRYTGWGRLSKKLINGIRDKQSGKTILDFLKSDGFANRNFMQLIHDDSLTFKEEIQKAQVSGQGDSLHEHIANLAGSPAIKKGILQTVKVVDELVKVMGRHKPENIVIEMARENQTTQKGQKNSRERMKRIEEGIKELGSQILKEHPVENTQLQNEKLYLYYLQNGKDMYTGQELDIDRLSDYDVDHIIPQSFIKDDSIDNKVLTSSEKARGKSDDVPSEEVVKKMKSYWRQLLNAKLISQRKFDNLTKAERGGLSELDKAGFIKRQLVETRQITKHVAQILDSRMNTKYDENDKLIREVKVITLKSKLVSDFRKDFQFYKVREINNYHHAHDAYLNAVVGTALIKKYPKLESEFVYGDYKVYDVRKMIAKSEQEIGKATAKYFFYSNIMNFFKTEITLANGEIRKRPLIETNGETGEIVWDKGRDFATVRKVLSMPQVNIVKKTEVQTGGFSKESILPKRESDKLIARKKDWDTKKYGGFDSPTVAYSVLVVAKVEKGKKKKLKTVKELVGITIMERSSFEKDPIAFLEAKGYKEVQEDLIIKLPKYSLFELENGRKRLLASAGELQKGNELALPNKYVTFLYLASHYEKLKGSPEDEEQHQLYVEQHKHYFDEIFDQISEFSERYILADKNLDKIKSLYNKNRDKSISEQAESFINLFTLTALGAPAAFKFFGTTIDRKRYTSTKEILNATLIHQSITGLYETRIDLSQLGGD

SEQ ID NO: 29 - protein, 1368 aa, synthetic construct
MKKKYSIGLDIGTNSVGWAVITDEYKVPSKKFKVLGNTDRQSIKKNLLGALLFDSGETAEATRLKRTARRRYTRRKNRIRYLQEIFANEMAKVDDSFFHRLEESFLVEEDKKHERHPIFGNIVDEVAYHEKYPTIYHLRKKLADSTEKADLRLIYLALAHMIKFRGHFLIEGDLNPDNSDVDKLFIQLVQTYNQLFEENPINESGVDAKAILSARLSKSRRLENLIAQLPGEKKNGLFGNLIALSLGLTPNFKSNFDLAEDAKLQLSKDTYDEDLDNLLAQIGDQYADLFLAAKNLSDAILLSDILTVNSEITKAPLSASMIKRYDEHHQDLTLLKALVRQQLPEKYKEIFFDQSKNGYAGYIDGGASQEEFYKYIKPILEKMDGTEELLAKINREDFLRKQRTFDNGSIPHQIHLGELHAILRRQEDFYPFLKENREKIEKILTFRIPYYVGPLARGNSRFAWMTRKSDETITPWNFEEVVDKGASAQAFIERMTNFDKNLPNEKVLPKHSLLYEYFTVYNELTKVKYVTEGMRKPEFLSGEQKQEIVDLLFKKNRKVTVKQLKEDYFKKIECFDSVEISGVEDRFNASLGTYHDLLKIIKDKDFLDNEENEDILEDIVLTLTLFEDKEMIEERLKKYAHLFDDKVLKQLKRRRYTGWGRLSRKLINGIRDKQSGKTILDFLKSDGFANRNFMQLIHDDSLTFKEDIQKAQVSGQGDSLHEQIANLAGSPAIKKGILQTVKIVDELVKVMGRHKPENIVIEMARENQTTQKGQKNSRERMKRLEEGIKELGSQILKEHPVENTQLQNEKLYLYYLQNGKDMYTGEELDIDRLSDYDVDHIIPQSFIKDDSIDNKVLTSSKKARGKSDNVPSEEVVKKMKSYWRQLLNAKLISQRKFDNLTKAERGGLSELDKAGFIKRQLVETRQITKHVAQILDSRFNTEYDENDKLIREVKIITLKSKLVSDFRKDFQFYKVREINNYHHAHDAYLNAVVGTALIKKYPKLESEFVYGDYKVYDVRKMIAKSEQEIGKATAKRFFYSNIMNFFKTEITLANGEIRKRPLIETNEETGEIVWDKEKDFATVRKVLSMPQVNIVKKTEVQTGGFSKESILPKRNSDKLIARKKDWDTKKYGGFDSPTVAYSVLVVAKVEKGKTKKLKTVKELVGITIMERSSFEKDPVDFLEAKGYKEIQKDLIIKLPKYSLFELENGRKRMLASAGELQKGNELALPSKYVTFLYLASHYEKLKGSPEDNEQKQLYVEQHKHYFDEIVDQISEFSKRYILADANLDKILSLYNKNRDKSIREQAENIINLFTLTALGAPAAFKFFDTTIDRKRYTSTKEILDATLIHQSITGLYETRIDLSQLGGD

SEQ ID NO: 30 - protein, 1368 aa, synthetic construct
MKKKYSIGLDIGTNSVGWAVITDDYKVPSKKFKVLGNTDRQSIKKNLIGALLFDSGETAEATRLKRTARRRYTRRKNRIRYLQEIFAEEMAKVDDSFFHRLEESFLVEEDKKHERHPIFGNIVDEVAYHEKYPTIYHLRKKLVDSTEKADLRLIYLALAHMIKFRGHFLIEGDLNPENSDVDKLFIQLVQTYNQLFEENPINESGVDAKAILSAKLSKSRRLENLIAQLPGEKKNGLFGNLIALSLGLTPNFKSNFDLAEDAKLQLSKDTYDDDLENLLAQIGDQYADLFLAAKNLSDAILLSDILRVNTEITKAPLSASMIKRYDEHHQDLTLLKALVRQQLPEKYKEIFFDPSKNGYAGYIDGGASQEEFYKFIKPILEKMDGTEELLAKLNREDLLRKQRTFDNGSIPHQIHLGELHAILRRQEEFYPFLKENREKIEKILTFRIPYYVGPLARGNSRFAWMTRKSEETITPWNFEEVVDKGASAQSFIERMTNFDENLPNEKVLPKHSLLYEYFTVYNELTKVKYVTEGMGKPEFLSGEQKKEIVDLLFKKNRKVTVKQLKEDYFKEIECFDSVEISGVEDRFNASLGTYHDLLKIIKDKDFLDNEENEDILEDIVLTLTLFEDREMIEERLKKYANLFDKKVMKQLKRRRYTGWGRLSRKLINGIRDKQSGKTILDFLKSDGFANRNFMQLIHDDSLTFKEAIKKAQVSGQGDSLHEQIANLAGSPAIKKGILQTVKVVDELVKVMGRHKPENIVIEMARENQTTQKGQKNSRERMKRIEEGIKELGSQILKEHPVENTQLQNEKLYLYYLQNGRDMYTGEELDINRLSDYDVDHIVPQSFLKDDSIDNKVLTRSDKARGKSDNVPSEEVVKKMKNYWRQLLKAGLITQRKFDNLTKAERGGLSELDKAGFIKRQLVETRQITKHVAQILDSRMNTKRDENDKLIRDVKVITLKSKLVSDFRKDFQFYKVREINNYHHAHDAYLNAVVGTALIKKYPKLESEFVYGDYKKYDVRKMIAKSEQEIGKATAKYFFYSNIMNFFKTEITLANGEIRKRPLIETNEETGEIVWDKERDFATVRKVLSMPQVNIVKKTEVQTGGFSKESILPKRESDKLIARKKGWDPKKYGGFDSPTVAYSVLVVAKVEKGKTKKLKTVKELLGITIMERSSFEKDPIAFLEAKGYKDVKKDLIIKLPKYSLFELENGRKRMLASAGELQKGNELALPSKYVNFLYLASHIEKLKGSPEDEEKKQLYVEQHKHYLDEIIEQISEFSERVILADKNLDKVLSAYNNNRDKSIEEQAENIIHLFTLTNLGAPAAFKYFGTTIDRKRYTSTKEVLDATLIHQSITGLYETRIDLSQLGGD

SEQ ID NO: 31 - protein, 1368 aa, synthetic construct
MDKKYSIGLDIGTNSVGWAVITDEYKVPSKKFKVLGNTDRHSIKKNLIGALLFDSGETAEATRLKRTARRRYTRRKNRIRYLQEIFAEEMAKVDDSFFHRLEESFLVEEDKKNERHPIFGNIVDEVAYHEKYPTIYHLRKKLVDSDEKADLRLIYLALAHMIKFRGHFLIEGDLNSDNSDVQKLFIQLVETYNQLFEESPIEAEGVDAKAILSEKLSKSRRLENLIAQLPGEKKNGLFGNLIALSLGLTPNFKSNFDLSEDAKLQLSKDTYDDDLEELLGQIGDQYADLFLAAKNLSDAILLSGILRVSTESTKAPLSASMIKRYDEHHQDLTLLKDLVRKQLPEKYKEIFFDQSKNGYAGYIDGGASQEEFYKYIKPILEKMDGTEELLDKLEREDLLRKQRTFDNGSIPHQIHLGELHAILRRQEKYYPFLKENREKIEKILTFRIPYYVGPLARGNSRFAWMSRKSDETITPWNFEEVVDKGASAEAFIERMTNFDKNLPDEKVLPKHSLLYEYFTVYNELTKVKYVTEGMRKPEFLDGEQKKEIVDLLFKKNRKVTVKQLKEDYFKKFECFDIVEISGVEDRFNASLGTYHDLLKIIKDKEFLDNEENEEILEDIVLTLTLFEDREMIKERLEKYADLFDKKVMKQLKRRRYTGWGRLSKKLINGIRDKQSGKTILDFLKADGFANRNFMQLIHDDSLTFKDEIEKAQVTGDGESLHEHIANLAGSPAIKKGILQTVKVVDELVKVMGRHKPENIVIEMARENQTTQKGQKNSRERMKRIEEGIKELGSQILKEHPVENTQLQNEKLYLYYLQNGRDMYVDQELDINRLSDYDVDHIVPQSFLKDDSIDNKVLTRSDKARGKSDNVPSEEVVKKMKNYWRQLLNAKLITQRKFDNLTKAERGGLSELDKAGFIKRQLVETRQITKHVAQILDSRMNTEYDENDKLIRDVKVITLKSKLVSDFRKDFQFYKVREINNYHHAHDAYLNAVVGTALIKKYPKLESEFVYGDYKVYDVRKMIAKSEQEIGKATAKYFFYSNIMNFFKTEITLANGEIRKRPLIEVNEETGEIVWDKEKDFATVRKVLSMPQVNIVKKTEVQTGGFSKESILPKRDSDKLIARKKDWDPKKYGGFDSPTVAYSVLVVAKVEKGKTKKLKTVKELLGITIMERSAFEKNPVAFLEAKGYQEVKKDLIIKLPKYSLFELENGRKRMLASAGELQKGNELALPSKYVNFLYLASHYEKLKGSPEDNEQKQEFVEQHKEYLDEIIDQISEFSKRVILADANLEKVKKAYEKHKDKSIEEQAENIIHLFTLTALGAPAAFKYFGTTIDRKRYTSTKEVLNATLIHQSITGLYETRIDLSQLGGD

SEQ ID NO: 32 - protein, 1368 aa, synthetic construct
MKKKYSIGLDIGTNSVGWAVITDEYKVPSKKFKVLGNTDRQSIKKNLIGALLFDSGETAEATRLKRTARRRYTRRKNRIRYLQEIFAEEMSKVDDSFFHRLEESFLVEEDKKHERHPIFGNIVDEVAYHEKYPTIYHLRKKLVDSTEKADLRLIYLALAHMIKFRGHFLIEGDLNSENSDVDKLFIQLVQTYNQLFEENPINEEGVDAKAILSAKLSKSRRLENLIAQFPGEKKNGLFGNLIALSLGLTPNFKSNFDLAEDAKLQLSKDTYDDDLENLLAQIGDQYADLFLAAKNLSDAILLSDILRVNTEITKAPLSASMIKRYDEHHQDLTLLKALVRQQLPEKYKEIFFDESKNGYAGYIDGGASQEEFYKFIKPILEKMDGTEELLAKLNREDLLRKQRTFDNGSIPHQIHLGELHAILRRQEDFYPFLKENREKIEKILTFRIPYYVGPLARGNSRFAWMTRKSEETITPWNFEEVVDKGASAQSFIERMTNFDKNLPNEKVLPKHSLLYEYFTVYNELTKVKYVTEGMGKPEFLSGEQKKEIVDLLFKKNRKVTVKQLKEDYFKKIECFDSVEISGVEDRFNASLGTYHDLLKIIKDKDFLDNEENEDILEDIVLTLTLFEDREMIEERLKKYANLFDDKVMKKLKRRRYTGWGRLSRKLINGIRDKQSGKTILDFLKSDGFANRNFMQLIHDDSLTFKEAIKKAQVSGQGDSLHEQIANLAGSPAIKKGILQTVKVVDELVKVMGRHKPENIVIEMARENQTTQKGQKNSRERMKRIEEGIKELGSQILKEHPVENTQLQNEKLYLYYLQNGRDMYTGQELDINRLSDYDVDHIVPQSFLKDDSIDNKVLTRSEEARGKSDNVPSEEVVKKMKPYWRQLLKAKLITQRKFDNLTKAERGGLSELDKAGFIKRQLVETRQITKHVAQILDSRMNTKRDENDKLIRDVKVITLKSKLVSDFRKDFQFYKVREINNYHHAHDAYLNAVVGTALIKKYPKLESEFVYGDYKVYDVRKMIAKSEQEIGKATAKYFFYSNIMNFFKSEIKLANGEIRKRPLIETNEETGEIVWDKERDFATVRKVLSMPQVNIVKKTEVQTGGFSKESILPKRNSDKLIARKKDWDPKKYGGFDSPTVAYSVLVVAKVEKGKAKKLKTVKELLGITIMERSSFEKDPVAFLEAKGYKDVKKDLIIKLPKYSLFELENGRKRMLASAGELQKGNELALPSKYVNFLYLASHYEKLKGSPEDNEQKQLYVEQHKNYLDEIIDQISEFSERVILADKNLEKVLSAYNEFRDKPIEEQAENIIHLFTLTNLGAPAAFKYFDKTIDRKRYTSTKEVLDATLIHQSITGLYETRIDLSQLGGD

SEQ ID NO: 33 - protein, 1368 aa, synthetic construct
MDKKYSIGLDIGTNSVGWAVITDEYKVPSKKFKVLGNTDRHSIKKNLIGALLFDSGETAEATRLKRTARRRYTRRKNRICYLQEIFSNEMAKVDDSFFHRLEESFLVEEDKRHERHPIFGNIVDEVAYHEKYPTIYHLRKKLADSTEKADLRLIYLALAHMIKFRGHFLIEGDLNSDNSDVDKLFIQLVQTYNQLFEENPINASGVDAKAILSARLSKSRRLENLIAQLPGEKKNGLFGNLIALSLGLTPNFKSNFDLAEDAKLQLSKDTYDDDLDNLLAQIGDQYADLFLAAKNLSDAILLSDILRVNTEITKAPLSASMIKRYDEHHQDLTLLKALVRQQLPEKYKEIFFDQSKNGYAGYIDGGASQEEFYKFIKPILEKMDGTEELLVKLNREDLLRKQRTFDNGSIPHQIHLGELHAILRRQEDFYPFLKDNREKIEKILTFRIPYYVGPLARGNSRFAWMTRKSEETITPWNFEEVVDKGASAQSFIERMTNFDKNLPNEKVLPKHSLLYEYFTVYNELTKVKYVTEGMRKPAFLSGEQKKAIVDLLFKTNRKVTVKQLKEDYFKKIECFDSVEISGVEDRFNASLGTYHDLLKIIKDKDFLDNEENEDILEDIVLTLTLFEDREMIEERLKTYAHLFDDKVMKQLKRRRYTGWGRLSRKLINGIRDKQSGKTILDFLKSDGFANRNFMQLIHDDSLTFKEDIQKAQVSGQGESLHEQIANLAGSPAIKKGILQTIKIVDELVKVMGRHAPENIVIEMARENQTTQKGQKNSRERMKRIEEGIKELGSQILKEHPVENTQLQNEKLYLYYLQNGRDMYVDQELDINRLSDYDVDHIVPQSFLKDDSIDNKVLTRSDKARGKSDNVPSEEVVKKMKNYWRQLLNAKLITQRKFDNLTKAERGGLSELDKAGFIKRQLVETRQITKHVAQILDSRFNTEYDDNDKLIRDVKIITLKSKLVSDFRKDFGLYKVREINNYHHAHDAYLNAVVGTALIKKYPKLESEFVYGDYKVYDVRKMIAKSDKEIGKATAKYFFYSNIMNFFKTDVTLANGEIRKRPLIEVNEETGEIVWDKEKDFATVRKVLSMPQVNIVKKTEVQTGGFSKESILPKRNSDKLIARKKDWDTKKYGGFDSPTVAYSVLVIAKVEKGKAKKLKTVKELVGITIMERSAFEKDPVAFLEAKGYQDIQKDLIIKLPKYSLFELENGRKRMLASAGELQKGNELALPQKYVTLLYLASKYEKLKGSEEDNEKKQLYVEQHKEYFDEIMDQISEFAKRYILADANLEKIKSLYEKNFDASIEELAENFIHLLTFTNLGAPAAFKFFDTTIDRKRYTSTKEILNATLIHQSITGLYETRIDLSQLGGD

SEQ ID NO: 34 - protein, 1368 aa, synthetic construct
MDKKYSIGLDIGTNSVGWAVITDEYKVPSKKFKVLGNTDRQSIKKNLIGALLFDSGETAEATRLKRTARRRYTRRKNRIRYLQEIFSEEMSKVDDSFFHRLEESFLVEEDKKHERHPIFGNIVDEVAYHEKYPTIYHLRKKLADSTEKADLRLIYLALAHMIKFRGHFLIEGDLNPDNSDVDKLFIQLVQTYNQLFEENPINESGVDAKAILSARLSKSRRLENLIAQLPGEKKNGLFGNLIALSLGLTPNFKSNFDLAEDAKLQLSKDTYDEDLDNLLAQIGDQYADLFLAAKNLSDAILLSDILTVNSEITKAPLSASMIKRYDEHHQDLTLLKALVRQQLPEKYKEIFFDQSKNGYAGYIDGGASQEEFYKFIKPILEKMDGTEELLAKLNREDFLRKQRTFDNGSIPHQIHLGELHAILRRQEDFYPFLKENREKIEKILTFRIPYYVGPLARGNSRFAWMTRKSEETITPWNFEEVVDKGASAQAFIERMTNFDKNLPTEKVLPKHSLLYEYFTVYNELTKVKYVTEGMGKPEFLSGEQKQEIVDLLFKKNRKVTVKQLKEDYFKKIECFDSVEISGVEDRFNASLGTYHDLLKIIKDKDFLDNEENEDILEDIVLTLTLFEDREMIEERLKKYANLFDDKVLKQLKRRRYTGWGRLSKKLINGIRDKQSGKTILDFLKSDGFANRNFMQLIHDDSLTFKEEIKKAQVSGQGDSLHEQIANLAGSPAIKKGILQTVKIVDELVKVMGRHKPENIVIEMARENQTTQKGQKNSRERMKRLEEGLKELGSQILKEHPVENTQLQNEKLYLYYLQNGKDMYTGQELDIDRLSDYDVDHIIPQSFIKDDSIDNKVLTSSDKARGKSDDVPSEEVVKKMKNYWRQLLNAKLISQRKFDNLTKAERGGLSELDKAGFIKRQLVETRQITKHVAQILDSRMNTEYDENDKLIRDVKIITLKSKLVSDFRKDFQFYKVREINNYHHAHDAYLNAVVGTALIKKYPKLESEFVYGDYKVYDVRKMIAKSEQEIGKATAKRFFYSNIMNFFKTEITLANGEIRKRPLIETNEETGEIVWDKEKDFATVRKVLSMPQVNIVKKTEVQTGGFSKESILPKRNSDKLIARKKDWDTKKYGGFDSPTVAYSVLVVAKVEKGKSKKLKTVKELVGITIMERSSFEKDPVAFLEAKGYKEVQKDLIIKLPKYSLFELENGRKRMLASAGELQKGNELALPSKYVTFLYLASHYEKLKGSPEDNEKKQLFVEQHKHYFDEILDQISEFSKRYILADKNLDKVLSLYNKFRDKSIREQAESIINLFTLTNLGAPAAFKFFDTTIDRKRYTSTKEILDSTLIHQSITGLYETRIDLSQLGGD

SEQ ID NO: 35 - protein, 1368 aa, synthetic construct
MDKKYSIGLDIGTNSVGWAVITDEYKVPSKKFKVLGNTDRHSIKKNLIGALLFDSGETAEATRLKRTARRRYTRRKNRICYLQEIFSNEMAKVDDSFFHRLEESFLVEEDKKNERHPIFGNIVDEVAYHEKYPTIYHLRKKLADSTEKADLRLIYLALAHMIKFRGHFLIEGDLNSDNSDVQKLFIQLVQTYNQLFEENPLNESGVDAKAILSARLSKSRRLENLIAQFPGEKKNGLFGNLIALSLGLTPNFKSNFDLAEDAKLQLSKDTYDEDLENLLAQIGDQYADLFLAAKNLSDAILLSDILTVNDEITKAPLSASMVKRYDEHHQDLTLLKALVRQQLPEKYKEIFFDQSKNGYAGYIDGGASQEEFYKYIKPILEKIDGSEEFLAKINREDFLRKQRTFDNGSIPHQIHLGELHAILRRQEDYYPFLKDNREKIEKILTFRIPYYVGPLARGNSRFAWMTRKSEETITPWNFEEVVDKEASAQSFIERMTNFDKNLPNEKVLPKHSLLYEYFTVYNELTKVKYVTEGMRKPEFLSGEQKQEIVDLLFKKNRKVTVKQLKEYLFKKIECFDSVEISGVEDRFNASLGTYHDLLKIIKDKDFLDNEENEKILEDIVLTLTLFEDREMIEERLKKYAHLFDDKVLKQLKRRRYTGWGRLSRKLINGIRDKQSGKTILDFLKSDGFANRNFMQLIHDDSLTFKEEIKKAQVSGQGDSLHEHIANLAGSPAIKKGILQTVKVVDELVKVMGRHKPENIVIEMARENQTTQKGQKNSRERMKRIEEGIKELGSQILKEHPVENTQLQNEKLYLYYLQNGRDMYVDQELDINRLSDYDVDHIVPQSFLKDDSIDNKVLTRSDKARGKSDNVPSEEVVKKMKNYWRQLLNAKLITQRKFDNLTKAERGGLSELDKAGFIKRQLVETRQITKHVAQILDSRMNTKYDENDKLIREVKVITLKSKLVSDFRKDFQFYKVREINNYHHAHDAYLNAVVGTALIKKYPKLESEFVYGDYKVYDVRKMIAKSEQEIGKATAKYFFYSNIMNFFKTEITLANGEIRKRPLIETNGETGEIVWDKGRDFATVRKVLSMPQVNIVKKTEVQTGGFSKESILPKRNSDKLIARKKDWDPKKYGGFDSPTVAYSVLVVAKVEKGKAKKLKTVKELVGITIMERSSFEKNPVAFLEAKGYKEVQKDLIIKLPKYSLFELENGRKRLLASAGELQKGNELALPNKYVTLLYLASHYEKLKGSPEDNEQKQLFVEQHKHYFDEIIEQISEFSKRVILADANLEKILSLYNKNRDASIEEQAENFIHLLTFTNLGAPAAFKFFDTTIDRKRYTSTKEILDATLIHQSITGLYETRIDLSQLGGD

SEQ ID NO: 36 - protein, 1368 aa, synthetic construct
MDKKYSIGLDIGTNSVGWAVITDEYKVPSKKFKVLGNTDRQSIKKNLIGALLFDSGETAEATRLKRTARRRYTRRKNRIRYLQEIFSNEMAKVDDSFFHRLEESFLVEEDKKHERHPIFGNIVDEVAYHENYPTIYHLRKKLADSTEKADLRLIYLALAHMIKFRGHFLIEGDLNSDNSDVDKLFIQLVQTYNQLFEENPINESGVDAKAILSAKLSKSRRLENLIAQLPGEKKNGLFGNLIALSLGLTPNFKSNFDLAEDAKLQLSKDTYDDDLENLLAQIGDQYADLFLAAKNLSDAILLSDILTVNSEITKAPLSASMIKRYDEHHQDLTLLKALVRQQLPEKYKEIFFDQSKNGYAGYIDGGASQEEFYKYIKPILEKMDGTEELLAKLNREDFLRKQRTFDNGSIPHQIHLGELHAILRRQEEFYPFLKENREKIEKILTFRIPYYVGPLARGNSRFAWMTRKSEETITPWNFEEVVDKGASAQAFIERMTNFDKNLPNEKVLPKHSLLYEYFTVYNELTKVKYVTEGMRKPEFLSGEQKKEIVDLLFKKNRKVTVKQLKEDYFKKIECFDSVEISGVEDRFNASLGTYHDLLKIIKDKDFLDNEENEDILEDIVLTLTLFEDREMIEERLKKYAHLFDDKVLKQLKRRRYTGWGRLSKKLINGIRDKQSGKTILDFLKSDGFANRNFMQLIHDDSLTFKEDIKKAQVSGQGDSLHEQIANLAGSPAIKKGILQTVKIVDELVKVMGRHKPENIVIEMARENQTTQKGQKNSRERMKRIEEGLKELGSQILKEHPVENTQLQNEKLYLYYLQNGKDMYTGDELDIDRLSDYDVDHIIPQSFIKDDSIDNKVLTSSAEARGKSDNVPSEEVVKKMKSYWRQLLKAKLISQRKFDNLTKAERGGLSELDKAGFIKRQLVETRQITKHVAQILDSRMNTKRDENDKLIRDVKIITLKSKLVSDFRKDFQFYKVREINNYHHAHDAYLNAVVGTALIKKYPKLESEFVYGDYKVYDVRKMIAKSEQEIGKATAKRFFYSNIMNFFKTEITLANGEIRKRPLIETNEETGEIVWDKEKDFATVRKVLSMPQVNIVKKTEVQTGGFSKESILPKRNSDKLIARKKDWDPKKYGGFDSPTVAYSVLVVAKVEKGKTKKLKTVKELVGITIMERSSFEKDPVKFLEAKGYKEIQKDLIIKLPKYSLFELENGRKRLLASAGELQKGNELALPSKYVTFLYLASHYEKLKGSPEDNEQKQLFVEQHKHYFDEILDQISEFSKRYILADKNLDKVLSLYNKFRDKSISEQAENFINLFTLTNLGAPAAFKFFDTTIDRKRYTSTKEILDSTLIHQSITGLYETRIDLSQLGGD

SEQ ID NO: 37 - protein, 1368 aa, synthetic construct
MKKKYSIGLDIGTNSVGWAVITDEYKVPSKKFKVLGNTDRHSIKKNLIGALLFDSGETAEATRLKRTARRRYTRRKNRIRYLQEIFSEEMAKVDDSFFHRLEESFLVEEDKKHERHPIFGNIVDEVAYHEKYPTIYHLRKELADSTEKADLRLIYLALAHMIKFRGHFLIEGDLNPDNSDVDKLFIQLVQTYNQLFEENPINESGVDAKAILSAKLSKSRRLENLIAQLPGEKKNGLFGNLIALSLGLTPNFKSNFDLAEDAKLQLSKDTYDDDLENLLAQIGDQYADLFLAAKNLSDAILLSDILTVNSEITKAPLSASMIKRYDEHHQDLTLLKALVRQQLPEKYKEIFFDKSKNGYAGYIDGGASQEEFYKFIKPILEKMDGTEELLAKLNREDFLRKQRTFDNGSIPHQIHLGELHAILRRQEEFYPFLKENREKIEKILTFRIPYYVGPLARGNSRFAWMTRKSEETITPWNFEEVVDKGASAQAFIERMTNFDKNLPEEKVLPKHSLLYEYFTVYNELTKVKYVTEGMKKPEFLSGEQKQEIVDLLFKKNRKVTVKQLKEDYFKKIECFDSVEISGVEDRFNASLGTYHDLLKIIKDKDFLDNEENEDILEDIVLTLTLFEDKEMIEERLKKYANLFDDKVLKQLKRRRYTGWGRLSRKLINGIRDKQSGKTILDFLKSDGFANRNFMQLIHDDSLTFKEEIQKAQVSGQGDSLHEQIANLAGSPAIKKGILQTVKIVDELVKVMGRHKPENIVIEMARENQTTQKGQKNSRERMKRIEEGIKELGSQILKEHPVENTQLQNEKLYLYYLQNGKDMYTGQELDIDRLSDYDVDHIIPQSFIKDDSIDNKVLTSSKEARGKSDNVPSEEVVKKMKSYWRQLLKAKLISQRKFDNLTKAERGGLSELDKAGFIKRQLVETRQITKHVAQILDSRFNTERDENDKLIRDVKIITLKSKLVSDFRKDFQFYKVREINNYHHAHDAYLNAVVGTALIKKYPKLESEFVYGDYKVYDVRKMIAKSEQEIGKATAKYFFYSNIMNFFKSEITLANGEIRKRPLIETNEETGEIVWDKEKDFATVRKVLSMPQVNIVKKTEVQTGGFSKESILPKRNSDKLIARKKDWDPKKYGGFDSPTVAYSVLVVAKVEKGKTKKLKTVKELVGITIMERSSFEKDPIAFLEAKGYKEVQKDLIIKLPKYSLFELENGRKRMLASAGELQKGNELALPSKYVTFLYLASHYEKLKGSPEDNEQKQLFVEQHKHYFDEILEQISEFSKRYILADKNLEKILSLYNNFEDKSIREQAENIINLFTLTNLGAPAAFKFFDTTIDRKRYTSTKEILDATLIHQSITGLYETRIDLSQLGGD

SEQ ID NO: 38 - protein, 1368 aa, synthetic construct
MKKKYSIGLDIGTNSVGWAVITDEYKVPSKKFKVLGNTDRHSIKKNLIGALLFDSGETAEATRLKRTARRRYTRRKNRIRYLQEIFSEEMAKVDDSFFHRLEESFLVEEDKKHERHPIFGNIVDEVAYHEKYPTIYHLRKKLADSTEKADLRLIYLALAHMIKFRGHFLIEGDLNSDNSDVDKLFIQLVQTYNQLFEENPINEEGVDAKAILSAKLSKSRRLENLIAQLPGEKKNGLFGNLIALSLGLTPNFKSNFDLAEDAKLQLSKDTYDEDLENLLAQIGDQYADLFLAAKNLSDAILLSDILTVNSEITKAPLSASMIKRYDEHHQDLTLLKKLVRQQLPEKYKEIFFDQSKNGYAGYIDGGASQEEFYKYIKPILEKMDGTEELLAKLNREDFLRKQRTFDNGSIPHQIHLGELHAILRRQEDFYPFLKENREKIEKILTFRIPYYVGPLARGNSRFAWMTRKSEETITPWNFEEVVDKGASAQSFIERMTNFDKNLPNEKVLPKHSLLYEYFTVYNELTKVKYVTEGMRKPEFLSGEQKQEIVDLLFKKNRKVTVKQLKEDYFKKIECFDSVEISGVEDRFNASLGTYHDLLKIIKDKDFLDNEENEDILEDIVLTLTLFEDKEMIEERLKKYANLFDKKVLKQLKRRRYTGWGRLSKKLINGIRDKQSGKTILDFLKSDGFANRNFMQLIHDDSLTFKEAIQKAQVSGQGDSLHEQIANLAGSPAIKKGILQTVKIVDELVKVMGRHKPENIVIEMARENQTTQKGQKNSRERMKRLEEGIKELGSQILKEHPVENTQLQNDKLYLYYLQNGKDMYTGKELDIDRLSDYDVDHIIPQSFIKDDSIDNKVLTRSAKARGKSDNVPSEEVVKKMKSYWRQLLNAKLISQRKFDNLTKAERGGLTELDKAGFIKRQLVETRQITKHVAQILDSRFNTEYDENDKLIREVKIITLKSKLVSDFRKDFQFYKVREINDYHHAHDAYLNAVVGTALIKKYPKLESEFVYGDYKVYDVRKMIAKSEQEIGKATAKRFFYSNIMNFFKTEITLANGEIRKRPLIETNEETGEIVWDKEKDFATVRKVLSMPQVNIVKKTEVQTGGFSKESILPKRNSDKLIARKKDWDPKKYGGFDSPTVAYSVLVVAKVEKGKSKKLKTVKELVGITIMERSSFEKDPVDFLEAKGYKEIQKDLIIKLPKYSLFELENGRKRMLASAGELQKGNELALPSKYVTFLYLASHYEKLKGKPEDNEQKQLYVEQHRHYFDEIVEQISEFSKRYILADKNLEKVLSLYNNKRDKSIREQAESIINLFTLTALGAPAAFKFFDTTIDRKRYTSTKEVLDATLIHQSITGLYETRIDLSQLGGD

SEQ ID NO: 39 - protein, 1368 aa, synthetic construct
MKKKYSIGLDIGTNSVGWAVITDEYKVPSKKFKVLGNTDRQSIKKNLIGALLFDSGETAEATRLKRTARRRYTRRKNRIRYLQEIFAEEMAKVDDSFFHRLEESFLVEEDKKNERHPIFGNIVDEVAYHENYPTIYHLRKELVDSDEKADLRLIYLALAHMIKFRGHFLIEGDLNSENSDVQKLFIQLVQTYNQLFEENPLDEEGVDAKAILSAKLSKSRRLENLIAQFPNEKKNGLFGNLIALSLGLTPNFKSNFGLSEDAKLQLSKDTYDEDLENLLAQIGDQYADLFLAAKNLSDAILLSGILRVNSEITKAPLSASMIKRYDEHHQDLTLLKALVRQQLPEKYKEIFFDKSKNGYAGYIDGGASQEEFYKYIKPILEKMDGTEYLLAKLNREDLLRKQRTFDNGSIPHQIHLGELHAILRRQEEYYPFLKENQEKIEKILTFRIPYYVGPLARGNSRFAWMTRKSDETITPWNFEEVVDKGASAQAFIERMTNFDKNLPTEKVLPKHSLLYEYFTVYNELTKVKYVTEGMGKPEFLSSEQKKEIVDLLFKKNRKVTVKQLKEFYFKEIECFDSVEISGVEDRFNASLGTYHDLLKIIKDKDFLDDEENEDILEDIVLTLTLFEDREMIEKRLKKYANLFDKKVMKKLKRRRYTGWGRLSKKLINGIRDKQSGKTILDFLKDDGFANRNFMQLIHDDSLTFKEEIKKAQVIGQGESLHEQIADLAGSPAIKKGILQTVKVVDELVKVMGRHKPENIVIEMARENQTTQKGQRNSRERMKRIEEGIKELGSDILKEHPVENTQLQNDKLYLYYLQNGRDMYTGDELDIDRLSDYDVDHIVPQSFIKDDSIDNKVLTRSEKARGKSDDVPSEEVVKKMKSYWRQLLKAKLITQRKFDNLTKAERGGLTELDKAGFIKRQLVETRQITKHVAQILDSRMNTERDENDKLIRDVKVITLKSKLVSDFRKDFQFYKVREINDYHHAHDAYLNAVVGTALIKKYPKLESEFVYGDYKVYDSRKMIAKSEQEIGKATAKYFFYSNIMNFFKTEITLANGEIRKRPLIETNGETGEIVWDKGRDFATVRKVLSMPQVNIVKKTEVQTGGFSKESILPKRNSDKLIARKKDWDPKKYGGFDSPTVAYSVLVVAKVEKGKSKKLKSVKELLGITIMERSSFEKNPIDFLEAKGYKEVKKDLIIKLPKYSLFELENGRKRMLASAGELQKGNELALPSKYVNFLYLASHYEKLKGSPEDNEQKQLFVEQHKHYLDEIIEQISEFSKRVILADANLDKVLSAYNKHRDKPIREQAENIIHLFTLTNLGAPAAFKYFDTTIDRKRYTSTKEVLDATLIHQSITGLYETRIDLSQLGGD

SEQ ID NO: 40 - protein, 1368 aa, synthetic construct
MDKKYSIGLDIGTNSVGWAVITDEYKVPSKKFKVLGNTDRQSIKKNLLGALLFDSGETAEATRLKRTARRRYTRRKNRICYLQEIFAEEMAKVDDSFFHRLEESFLVEEDKKHERHPIFGNIVDEVAYHEKYPTIYHLRKKLADSTEKADLRLIYLALAHMIKFRGHFLIEGDLNSDNSDVDKLFIQLVQTYNQLFEENPINESGVDAKAILSAKLSKSRRLENLIAQFPGEKKNGLFGNLIALSLGLTPNFKSNFDLSEDAKLQLSKDTYDEDLDNLLAQIGDQYADLFLAAKNLSDAILLSDILTVNSEITKAPLSASMIKRYDEHHQDLTLLKALVRQQLPEKYKEIFFDQSKNGYAGYIDGGASQEEFYKYIKPILEKMDGTEELLAKLNREDFLRKQRTFDNGSIPHQIHLGELHAILRRQEAFYPFLKENREKIEKILTFRIPYYVGPLARGNSRFAWMTRKSEETITPWNFEEVVDKGASAQSFIERMTNFDKNLPNEKVLPKHSLLYEYFTVYNELTKVKYVTEGMRKPEFLSGEQKKEIVDLLFKKNRKVTVKQLKEDYFKKIECFDSVEISGVEDRFNASLGTYHDLLKIIKDKDFLDNEENEDILEDIILTLTLFEDREMIEERLKKYAHLFDDKVMKQLKRRRYTGWGRLSRKLINGIRDKQSGKTILDFLKSDGFANRNFMQLIHDDSLTFKEEIQKAQVSGQGDSLHEQIANLAGSPAIKKGILQTVKIVDELVKVMGRHKPENIVIEMARENQTTQKGQKNSRERMKRIEEGIKELGSQILKEHPVENTQLQNEKLYLYYLQNGKDMYTGQELDIDRLSDYDVDHIIPQSFIKDDSIDNKVLTSSKEARGKSDNVPSEEVVKKMKSYWRQLLKAKLISQRKFDNLTKAERGGLSELDKAGFIKRQLVETRQITKHVAQILDSRFNTERDENDKLIRDVKIITLKSKLVSDFRKDFQFYKVREINNYHHAHDAYLNAVVGTALIKKYPKLESEFVYGDYKVYDVRKMIAKSEQEIGKATAKRFFYSNIMNFFKTEIKLANGEIRKRPLIETNEETGEIVWDKEKDFATVRKVLSMPQVNIVKKTEVQTGGFSKESILPKRESDKLIARKKDWDPKKYGGFDSPTVAYSVLVVAKVEKGKSKKLKPVKELVGITIMERSSFEKNPVKFLEAKGYKDVQKDLIIKLPKYSLFELENGRKRMLASAGELQKGNELALPSKYVTFLYLASHYEKLKGSPEDNEKKQLFVEQHKHYLDEIIEQISEFSKRYILADKNLDKILSLYNKNRDKSIREQAENIINLFTLTALGAPAAFKFFDTTIDRKRYTSTKEILNSTLIHQSITGLYETRIDLSQLGGD

SEQ ID NO: 41 - protein, 1368 aa, synthetic construct
MDKKYSIGLDIGTNSVGWAVITDEYKVPSKKFKVLGNTDRHSIKKNLIGALLFDSGETAEATRLKRTARRRYTRRKNRIRYLQEIFANEMAKVDDSFFHRLEESFLVEEDKKHERHPIFGNIVDEVAYHEKYPTIYHLRKKLADSTEKADLRLIYLALAHMIKFRGHFLIEGDLNSDNSDVDKLFIQLVQTYNQLFEENPINESGVDAKAILSARLSKSRRLENLIAQLPGEKKNGLFGNLIALSLGLTPNFKSNFDLAEDAKLQLSKDTYDDDLDNLLAQIGDQYADLFLAAKNLSDAILLSDILTVNSEITKAPLSASMIKRYDEHHQDLTLLKALVRQQLPEKYKEIFFDKSKNGYAGYIDGGASQEEFYKFIKPILEKMDGTEELLAKLNREDFLRKQRTFDNGSIPHQIHLGELHAILRRQEDFYPFLKENREKIEKILTFRIPYYVGPLARGNSRFAWMTRKSEETITPWNFEEVVDKGASAQSFIERMTNFDKNLPNEKVLPKHSLLYEYFTVYNELTKVKYVTEGMRKPEFLSGEQKKEIVDLLFKKNRKVTVKQLKEDYFKKIECFDSVEISGVEDRFNASLGTYHDLLKIIKDKDFLDNEENEDILEDIVLTLTLFEDKEMIEERLKKYAHLFDDKVMKQLKRRRYTGWGRLSRKLINGIRDKQSGKTILDFLKSDGFANRNFMQLIHDDSLTFKEEIQKAQVSGQGDSLHEQIANLAGSPAIKKGILQTVKIVDELVKVMGRHKPENIVIEMARENQTTQKGQKNSRERMKRIEEGIKELGSQILKEHPVENTQLQNEKLYLYYLQNGKDMYTGQELDIDRLSDYDVDHIIPQSFIKDDSIDNKVLTSSDKARGKSDDVPSEEVVKKMKNYWRQLLNAKLISQRKFDNLTKAERGGLSELDKAGFIKRQLVETRQITKHVAQILDSRMNTERDENDKLIRDVKIITLKSKLVSDFRKDFQFYKVREINNYHHAHDAYLNAVVGTALIKKYPKLESEFVYGDYKVYDVRKMIAKSEQEIGKATAKRFFYSNIMNFFKTEITLANGEIRKRPLIETNEETGEIVWDKEKDFATVRKVLSMPQVNIVKKTEVQTGGFSKESILPKRDSDKLIARKKDWDPKKYGGFDSPTVAYSVLVVAKVEKGKSKKLKTVKELVGITIMERSSFEKDPVDFLEAKGYKEVQKDLIIKLPKYSLFELENGRKRLLASAGELQKGNELALPSKYVTFLYLASHYEKLKGSPEDNEQKQLFVEQHKHYLDEIVDQISEFSKRYILADKNLDKILSLYNKHRDKPISEQAENIINLFTLTNLGAPAAFKFFDTTIDRKRYTSTKEILDATLIHQSITGLYETRIDLSQLGGD

SEQ ID NO: 42 - protein, 1368 aa, synthetic construct
MDKKYSIGLDIGTNSVGWAVITDEYKVPSKKFKVLGNTDRHSIKKNLIGALLFDSGETAEATRLKRTARRRYTRRKNRICYLQEIFSNEMAKVDDSFFHRLEESFLVEEDKKHERHPIFGNIVDEVAYHEKYPTIYHLRKELADSTEKADLRLIYLALAHIIKFRGHFLIEGDLNSENSDVQKLFIQLVQTYNQLFEENPINEEGVDAKAILSAKLSKSRRLENLIAQFPGEKKNGLFGNLIALSLGLTPNFKSNFDLAEDAKLQLSKDTYDEDLDNLLAQIGDQYADLFLAAKNLSDAILLSDILTVNDEITKAPLSASMIKRYDEHHQDLTLLKALVRQQLPEKYKEIFFDKSKNGYAGYIDGGASQEEFYKFIKPILEKMDGTEELLAKLNREDFLRKQRTFDNGSIPHQIHLGELHAILRRQEDFYPFLKENREKIEKILTFRIPYYVGPLARGNSRFAWMTRKSEETITPWNFEEVVDKEASAQAFIERMTNFDKNLPTEKVLPKHSLLYEYFTVYNELTKVKYVTEGMRKPEFLSGEQKKEIVDLLFKKNRKVTVKQLKEFLFKEIECFDSVEISGVEDRFNASLGTYHDLLKIIKDKDFLDNEENEDILEDIVLTLTLFEDREMIEERLKKYADLFDKKVLKQLKRRRYTGWGRLSRKLINGIRDKQSGKTILDFLKSDGFANRNFMQLIHDDSLTFKEEIKKAQVKGQGDSLHEHIANLAGSPAIKKGILQTVKVVDELVKVMGRHKPENIVIEMARENQTTQKGQKNSRERMKRIEEGIKELGSQILKEHPVENTQLQNEKLYLYYLQNGRDMYVDQELDINRLSDYDVDHIVPQSFLKDDSIDNKVLTRSDKARGKSDNVPSEEVVKKMKNYWRQLLNAKLITQRKFDNLTKAERGGLSELDKAGFIKRQLVETRQITKHVAQILDSRMNTKYDENDKLIREVKVITLKSKLVSDFRKDFQFYKVREINNYHHAHDAYLNAVVGTALIKKYPKLESEFVYGDYKVYDVRKMIAKSEQEIGKATAKYFFYSNIMNFFKTEITLANGEIRKRPLIETNGETGEIVWDKGRDFATVRKVLSMPQVNIVKKTEVQTGGFSKESILPKRNSDKLIARKKDWDTKKYGGFDSPTVAYSVLVVAKIEKGKSKKLKTVKELVGITIMERSSFEKDPIAFLEAKGYKNVQKDLIIKLPKYSLFELENGRKRLLASAGELQKGNELALPAKYVTLLYHASHYEKLKGSPEDNEQKLLYVEQHRHYFDEILEQISEFSKRYILADKNLDKILSLYNKFRDLSIEEQASSFINLFTLTALGAPAAFKFFDTTIDRKRYTSTKEILDATLIHQSITGLYETRIDLSQLGGD

SEQ ID NO: 43 - protein, 1368 aa, synthetic construct
MKKKYSIGLDIGTNSVGWAVITDEYKVPSKKFKVLGNTDRHSIKKNLLGALLFDSGETAEATRLKRTARRRYTRRKNRIRYLQEIFAEEMAKVDDSFFHRLEESFLVEEDKKHERHPIFGNIVDEVAYHEKYPTIYHLRKKLADSTEKADLRLIYLALAHMIKFRGHFLIEGDLNSDNSDVDKLFIQLVQTYNQLFEENPINEIGVDAKAILSAKLSKSRRLENLIAQLPGEKKNGLFGNLIALSLGLTPNFKSNFDLAEDAKLQLSKDTYDEDLENLLAQIGDQYADLFLAAKNLSDAILLSDILTVNDEITKAPLSASMIKRYDEHHQDLTLLKALVRQQLPEKYKEIFFDKSKNGYAGYIDGGASQEEFYKFIKPILEKMDGTEELLAKINREDFLRKQRTFDNGSIPHQIHLGELHAILRRQEDFYPFLKENREKIEKILTFRIPYYVGPLARGNSRFAWMTRKSEETITPWNFEEVVDKGASAQSFIERMTNFDKNLPNEKVLPKHSLLYEYFTVYNELTKVKYVTEGMRKPEFLSGEQKQEIVDLLFKKNRKVTVKQLKEDYFKKIECFDSVEISGVEDRFNASLGTYHDLLKIIKDKDFLDNEENEDILEDIVLTLTLFEDREMIEERLKKYAHLFDDKVLKQLKRRRYTGWGRLSRKLINGIRDKQSGKTILDFLKSDGFANRNFMQLIHDDSLTFKEEIQKAQVSGQGDSLHEQIANLAGSPAIKKGILQTVKIVDELVKVMGRHKPENIVIEMARENQTTQKGQKNSRERMKRLEEGIKELGSQILKEHPVENTQLQNDKLYLYYLQNGKDMYTGEELDIDRLSDYDVDHIIPQSFIKDDSIDNKVLTSSKKARGKSDNVPSEEVVKKMKSYWRQLLNAKLISQRKFDNLTKAERGGLSELDKAGFIKRQLVETRQITKHVAQILDSRMNTEYDENDKLIREVKIITLKSKLVSDFRKDFQFYKVREINNYHHAHDAYLNAVVGTALIKKYPKLESEFVYGDYKVYDVRKMIAKSEQEIGKATAKRFFYSNIMNFFKTEITLANGEIRKRPLIETNEETGEIVWDKEKDFATVRKVLSMPQVNIVKKTEVQTGGFSKESILPKRNSDKLIARKKDWDPKKYGGFDSPTVAYSVLVVAKVEKGKSKKLKTVKELVGITIMERSSFEKDPIDFLEAKGYKEVQKDLIIKLPKYSLFELENGRKRLLASAGELQKGNELALPSKYVTFLYLASHYEKLKGSPEDNEKKQLYVEQHKHYFDEILEQISEFSERYILADKNLEKILSLYNKFRDFPIEEQAESIINLFTLTNLGAPAAFKFFGTTIDRKRYTSTKEILDATLIHQSITGLYETRIDLSQLGGD

SEQ ID NO: 44 - protein, 1368 aa, synthetic construct
MDKKYSIGLDIGTNSVGWAVITDEYKVPSKKFKVLGNTDRHSIKKNLLGALLFDSGETAEATRLKRTARRRYTRRKNRIRYLQEIFAEEMAKVDDSFFHRLEESFLVEEDKRNERHPIFGNIVDEVAYHEKYPTIYHLRKKLADSDEKADLRLIYLALAHMIKFRGHFLIEGDLNSENSDVQKLFKQLVQTYNQLFEENPLNEEGVDAKAILTARLSKSRRLENLIAQFPGEKKNGLFGNLIALSLGLTPNFKSNFDLAEDAKLQLSKDTYDEDLENLLGQIGDQYADLFLAAKNLSDAILLSDILTVNDEITKAPLSASMVKRYDEHHQDLTLLKKLVRQQLPEKYKEIFFDQSKNGYAGYIDGGASQEEFYKYIKPILEKVDGSEEFLEKIEREDFLRKQRTFDNGSIPHQIHLGELHAILRRQEEFYPFLKENREKIEKILTFRIPYYVGPLARGNSRFAWMTRKSDETITPWNFEEVVDKEASAQKFIERMTNFDKNLPNEKVLPKHSLLYEKFTVYNELTKVKYVTEGMRKPEFLSGEQKQEIVDLLFKKNRKVTVKQLKEDYFKKIECFDSVEISGVEDRFNASLGTYHDLLKIIKDKDFLDNEENEKILEDIVLTLTLFEDREMIEERLKKYADLFDDKVLKQLKRRRYTGWGRLSRKLINGIRDKQSGKTILDFLKSDGFANRNFMQLIHDDSLTFKEEIEKAQVSGQGESLHELIANLAGSPAIKKGILQTLKIVDELVKVMGRHAPENIVIEMARENQTTQKGQKNSRERMKRIEEGIKELGSQILKEHPVENTQLQNEKLYLYYLQNGRDMYVDQELDINRLSDYDVDHIVPQSFLKDDSIDNKVLTRSDKARGKSDNVPSEEVVKKMKNYWRQLLNAKLITQRKFDNLTKAERGGLSELDKAGFIKRQLVETRQITKHVAQILDSRFNTKYDENDKLIRDVKIITLKSKLVSDFRKDFQLYKVREINNYHHAHDAYLNAVVGTALIKKYPKLESEFVYGDYKVYDVRKMIAKSEQEIGKATAKYFFYSNIMNFFKTEITLANGEIRKRPLIETNGETGEIVWDKGKDFATVKKVLSMPQVNIVKKTEVQTGGFSKESILPKRNSDKLIARKKDWDTKKYGGFDSPTVAYSVLVVAKVEKGKSKKLKTVKELVGITIMERSSFEKNPVDFLEAKGYKNIKKDLIIKLPKYSLFELENGRKRLLASAGELQKGNELALPNKYVTLLYLASHYEKLKGSPEDNEQKQLFVEQHKDYFDEIIEQISEFSKRVILADANLEKIKSLYEKNRDKPIEEQAENFIHLFTFTNLGAPAAFKFFDTTIDRKRYTSTKEVLNATLIHQSITGLYETRIDLSQLGGD

SEQ ID NO: 45 - protein, 1368 aa, synthetic construct
MKKKYSIGLDIGTNSVGWAVITDEYKVPSKKFKVLGNTDRQSIKKNLLGALLFDSGETAEATRLKRTARRRYTRRKNRIRYLQEIFAEEMAKVDDSFFHRLEESFLVEEDKKHERHPIFGNIVDEVAYHEKYPTIYHLRKKLADSTEKADLRLIYLALAHMIKFRGHFLIEGDLNSENSDVDKLFIQLVQTYNQLFEENPINESGVDAKAILSAKLSKSRRLENLIAQLPGEKKNGLFGNLIALSLGLTPNFKSNFDLAEDAKLQLSKDTYDDDLDNLLAQIGDQYADLFLAAKNLSDAILLSDILTVNSEITKAPLSASMIKRYDEHHQDLTLLKALVRQQLPEKYKEIFFDKSKNGYAGYIDGGASQEEFYKFIKPILEKMDGTEELLAKLNREDFLRKQRTFDNGSIPHQIHLGELHAILRRQEEFYPFLKENREKIEKILTFRIPYYVGPLARGNSRFAWMTRKSEETITPWNFEEVVDKGASAQSFIERMTNFDKNLPNEKVLPKHSLLYEYFTVYNELTKVKYVTEGMRKPEFLSGEQKQAIVDLLFKKNRKVTVKQLKEDYFKKIECFDSVEISGVEDRFNASLGTYHDLLKIIKDKEFLDNEENEDILEDIVLTLTLFEDKEMIEERLKKYANLFDDKVMKQLKRRRYTGWGRLSKKLINGIRDKQSGKTILDFLKSDGFANRNFMQLIHDDSLTFKEEIQKAQVSGQGDSLHEQIANLAGSPAIKKGILQTVKIVDELVKVMGRHKPENIVIEMARENQTTQKGQKNSRERMKRLEEGIKELGSQILKEHPVENTQLQNDKLYLYYLQNGKDMYTGQELDIDRLSDYDVDHIIPQSFIKDDSIDNKVLTSSKKARGKSDNVPSEEVVKKMKNYWRQLLKAKLISQRKFDNLTKAERGGLSELDKAGFIKRQLVETRQITKHVAQILDSRMNTKYDENDKLIRDVKIITLKSKLVSDFRKDFQFYKVREINDYHHAHDAYLNAVVGTALIKKYPKLESEFVYGDYKVYDVRKMIAKSEQEIGKATAKRFFYSNIMNFFKSEITLANGEIRKRPLIETNEETGEIVWDKGKDFATVRKVLSMPQVNIVKKTEVQTGGFSKESILPKRNSDKLIARKKDWDPKKYGGFDSPTVAYSVLVVAKVEKGKKKKLKTVKELVGITIMERSSFEKNPIAFLEAKGYKNVQKDLIIKLPKYSLFELENGRKRLLASAGELQKGNELALPSKYVTFLYLASHYEKLKGSPEDNEQKQLFVEQHNHYLDEIVDQISEFSKRYILADANLDKILSLYNNFRDKPINEQAENFINLFTLTALGAPAAFKFFNTTIDRKRYTSTKEILNATLIHQSITGLYETRIDLSQLGGD

SEQ ID NO: 46 - protein, 1368 aa, synthetic construct
MKKKYSIGLDIGTNSVGWAVITDEYKVPSKKFKVLGNTDRQSIKKNLLGALLFDSGETAEATRLKRTARRRYTRRKNRIRYLQEIFASEMSKIDDSFFHRLEESFLVEEDKKHERHPIFGNIVDEVAYHEKYPTIYHLRKKLADSTEKADLRLIYLALAHIIKFRGHFLIEGDLNSDNTDVQKLFIQLVQTYNQLFEENPLDESGVDAKAILTEKLSKSRRLENLIAQLPGEKKNGLFGNLIALSLGLTPNFKSNFELAEDAKLQLSKDTYDEDLENLLAQIGDQYADLFVAAKNLSDAILLSDILTVNDEITKAPLSASMIKRYDEHHQDLTLLKALVRQQLPEKYKEIFFDESKNGYAGYIDGGASQEEFYKFIKPILEKLDGTEELLAKLNREDLLRKQRTFDNGSIPHQIHLGELHAILRRQEDFYPFLKENREKIEKILTFRIPYYVGPLARGNSRFAWMTRKSEETITPWNFEEVVDKEASAQAFIERMTNFDKNLPEEKVLPKHSLLYEYFTVYNELTKVKYVTEGMGKPEFLSGEQKKEIVDLLFKKNRKVTVKQLKEDLFKEFECFDSVEISGVEDRFNASLGTYHDLLKIIKDKDFLDNEENEDILEDIILTLTLFEDREMIEERLKKYADLFDDKVLKQLKRRRYTGWGRLSKKLINGIRDKQSGKTILDFLKSDGFANRNFMQLIHDDSLTFKEEIKKAQVIGQTDSLHEQIANLAGSPAIKKGILQTVKIVDELVKVMGRHKPENIVIEMARENQTTQKGQKNSRERLKRIEEGIKELGSQILKEHPVENTQLQNEKLYLYYLQNGKDMYTGKELDIDRLSDYDVDHIIPQSFIKDDSIDNKVLTRSEKARGKSDNVPSEEVVKKMKSYWQKLLNAKLISQRKFDNLTKAERGGLSELDKAGFIKRQLVETRQITKHVAQILDSRFNTKRDENDKLIREVKIITLKSKLVSDFRKDFGFYKVREINDYHHAHDAYLNAVVGTALIKKYPKLESEFVYGDYKVYDSRKMIAKSEQEIGKATAKRFFYSNIMNFFKTEIKLADGEIIKRPLIETNEETGEIVWDKEKDFATVRKVLSMPQVNIVKKTEVQTGGFSKESILPKRNSDKLIARKKDWDTKKYGGFDSPTVAYSVLVVAKVEKGKAKKLKTVKELVGITIMERSSFEKNPVAFLEAKGYQNIQKDLIIKLPKYSLFELENGRKRLLASAGELQKGNELALPQKYVTFLYLASHYEKKKGSPEDEEQKQLYVEQHKYYFDEIIDQISEFSKRYILADKNLDKVEELYNKNRDKSIVELAESFINLFTFTALGAPAAFKFFDTTIDRKRYTSTKEILNSTLIHQSITGLYETRIDLSKLGGD

SEQ ID NO: 47 - protein, 1368 aa, synthetic construct
MDKKYSIGLDIGTNSVGWAVITDEYKVPSKKFKVLGNTDRHSIKKNLIGALLFDSGETAEATRLKRTARRRYTRRKNRICYLQEIFSNEMAKVDDSFFHRLEESFLVEEDKKHERHPIFGNIVDEVAYHEKYPTIYHLRKELADSTEKADLRLIYLALAHMIKFRGHFLIEGDLNSENTDVQKLFIQLVQTYNQLFEENPINEETVDAKAILSAKLSKSRRLENLIAQFPGEKRNGLFGNLIALSLGLTPNFKSNFDLAEDAKLQLSKDTYDEDLENLLGQIGDQYADLFLAAKNLSDAILLSDILTVNDEITKAPLSASMIKRYDEHHQDLTLLKALVRQQLPEKYKEIFFDESKNGYAGYIDGGASQEEFYKFIKPILEKMDGTEEFLAKINREDFLRKQRTFDNGSIPHQIHLGELHAILRRQEDFYPFLKENREKIEKILTFRIPYYVGPLARGNSRFAWMTRKSDETITPWNFEEVVDKEASAQAFIERMTNFDKNLPNEKVLPKHSLLYEKFTVYNELTKVKYVTEGMGKPEFLSGEQKQEIVDLLFKKNRKVTVKQLKEFYFKEIECFDSVEISGVEDRFNASLGTYHDLLKIIKDKDFLDNEENEDILEDIVLTLTLFEDREMIEKRLKKYANLFDKKVLKKLKRRRYTGWGRLSRKLINGIRDKQSGKTILDFLKSDGFANRNFMQLIHDDSLTFKEEIKKAQVSGQGDSLHEHIANLAGSPAIKKGILQTVKVVDELVKVMGRHKPENIVIEMARENQTTQKGQKNSRERMKRLEEGLKELGSQILKEHPVENTQLQNDKLYLYYLQNGKDMYTGEELDIDRLSDYDVDHIIPQSFIKDDSIDNKVLTSSEKARGKSDNVPSEEVVKKMKSYWRQLLNAKLISQRKFDNLTKAERGGLSELDKAGFIKRQLVETRQITKHVAQILDSRMNTKYDENDKLIREVKVITLKSKLVSDFRKDFQFYKVREINNYHHAHDAYLNAVVGTALIKKYPKLESEFVYGDYKVYDVRKMIAKSEQEIGKATAKYFFYSNIMNFFKTEITLANGEIRKRPLIETNGETGEIVWDKGRDFATVRKVLSMPQVNIVKKTEVQTGGFSKESILPKRDSDKLIARKKDWDTKKYGGFDSPTVAYSVLVVAKVEKGKAKKLKTVKELVGITIMERSSFEKDPVAFLEAKGYKEIQKDLIIKLPKYSLFELENGRKRLLASAGELQKGNELALPQKYVTFLYLASHYEKLKGSPEDNEKKQLYVEQHKHYFDEILDQISEFSKRYILADKNLEKILSLYNKNRDKPISEQAESIINLFTLTALGAPAAFKFFGTTIDRKRYTSTKEILDATLIHQSITGLYETRIDLSQLGGD

SEQ ID NO: 48 - protein, 1368 aa, synthetic construct
MDKKYSIGLDIGTNSVGWAVITDEYKVPSKKFKVLGNTDRHSIKKNLIGALLFDSGETAEATRLKRTARRRYTRRKNRICYLQEIFSNEMAKVDDSFFHRLEESFLVEEDKKHERHPIFGNIVDEVAYHEKYPTIYHLRKKLADSTEKADLRLIYLALAHMIKFRGHFLIEGDLNSDNSDVQKLFIQLVQTYNQLFEENPINESGVDAKAILSARLSKSRRLENLIAQFPGEKKNGLFGNLIALSLGLTPNFKSNFDLAEDAKLQLSKDTYDEDLENLLAQIGDQYADLFLAAKNLSDAILLSDILTVNSEITKAPLSASMVKRYDEHHQDLTLLKQLVRQQLPEKYKEIFFDQSKNGYAGYIDGGASQEEFYKYIKPILEKMDGSEEFLDKIEREDFLRKQRTFDNGSIPHQIHLGELHAILRRQEKYYPFLKDNREKIEKILTFRIPYYVGPLARGNSRFAWMTRKSDETITPWNFEEVVDKGASAQSFIERMTNFDKNLPNEKVLPKHSLLYEKFTVYNELTKVKYVTEGMRKPEFLSAEQKQEIVDLLFKKNRKVTVKQLKEDYFKKIECFDSVEISGVEDRFNASLGTYHDLLKIIKDKDFLDNEENEKILEDIVLTLTLFEDREMIEERLKKYAHLFDDKVLKQLKRRRYTGWGRLSRKLINGIRDKQSGKTILDFLKSDGFANRNFMQLIHDDSLTFKEEIEKAQVSGQGDSLHEHIANLAGSPAIKKGILQTVKVVDELVKVMGRHKPENIVIEMARENQTTQKGQKNSRERMKRIEEGIKELGSQILKEHPVENTQLQNEKLYLYYLQNGRDMYVDQELDINRLSDYDVDHIVPQSFLKDDSIDNKVLTRSDKARGKSDNVPSEEVVKKMKNYWRQLLNAKLITQRKFDNLTKAERGGLSELDKAGFIKRQLVETRQITKHVAQILDSRMNTKYDENDKLIREVKVITLKSKLVSDFRKDFQFYKVREINNYHHAHDAYLNAVVGTALIKKYPKLESEFVYGDYKVYDVRKMIAKSEQEIGKATAKYFFYSNIMNFFKTEITLANGEIRKRPLIETNGETGEIVWDKGRDFATVRKVLSMPQVNIVKKTEVQTGGFSKESILPKRDSDKLIARKKDWDTKKYGGFDSPTVAYSVLVVAKVEKGKTKKLKTVKELVGITIMERSAFEKNPVDFLEAKGYKEIKKDLIIKLPKYSLFELENGRKRMLASAGELQKGNELALPQKYVTLLYLASHYEKLKGSPEDNEQKQLFVEQHKHYFDEIIEQISEFSKRYILADANLEKILSLYEKHRDKPIEELAENFIHLFTLTALGAPAAFKFFDTTIDRKRYTSTKEILDATLIHQSITGLYETRIDLSQLGGD

SEQ ID NO: 49 - protein, 1368 aa, synthetic construct
MKKKYSIGLDIGTNSVGWAVITDDYKVPSKKFKVLGNTDRKSIKKNLIGALLFDSGETAEATRLKRTARRRYTRRKNRIRYLQEIFAEEMAKVDDSFFHRLEESFLVEEDKKHERHPIFGNIVDEVAYHEKYPTIYHLRKKLVDSTEKADLRLIYLALAHMIKFRGHFLIEGDLNSENSDVDKLFIQLVQTYNQLFEENPINESGVDAKAILSAKLSKSRRLENLIAQFPGEKKNGLFGNLIALSLGLTPNFKKNFDLAEDAKLQLSKDTYDDDLDNLLAQIGDQYADLFLAAKNLSDAILLSDILRVNTEITKAPLSASMIKRYDEHHQDLTLLKALVRQQLPEKYKEIFFDKSKNGYAGYIDGGASQEEFYKFIKPILEKMDGTEELLAKLNREDLLRKQRTFDNGSIPHQIHLGELHAILRRQEDFYPFLKENREKIEKILTFRIPYYVGPLARGNSRFAWMTRKSEETITPWNFEEVVDKGASAQSFIERMTNFDENLPEEKVLPKHSLLYEYFTVYNELTKVKYVTEGMRKPEFLSGEQKKEIVDLLFKKNRKVTVKQLKEDYFKEIECFDSVEISGVEDRFNASLGTYHDLLKIIKDKDFLDNEENEDILEDIVLTLTLFEDREMIEKRLKKYADLFDKKVMKQLKRRRYTGWGRLSRKLINGIRDKQSGKTILDFLKSDGFANRNFMQLIHDDSLTFKEEIKKAQVKGQGDSLHEQIANLAGSPAIKKGILQTVKVVDELVKVMGRHKPENIVIEMARENQTTQKGQKNSRERMKRIEEGIKELGSQILKEHPVENTQLQNEKLYLYYLQNGRDMYTGDELDINRLSQYDVDHIVPQSFLKDDSIDNKVLTRSDEARGKSDNVPSEEVVKKMKNYWRQLLKAGLITQRKFDNLTKAERGGLSELDKAGFIKRQLVETRQITKHVAQILDSRMNTKRDENDKLIRDVKVITLKSKLVSDFRKDFQFYKVREINNYHHAHDAYLNAVVGTALIKKYPKLESEFVYGDYKKYDVRKMIAKSEQEIGKATAKYFFYSNIMNFFKTEITLANGEIRKRPLIETNEETGEIVWDKERDFATVRKVLSMPQVNIVKKTEVQTGGFSKESILPKRNSDKLIARKKGWDPKKYGGFDSPTVAYSVLVVAKVEKGKSKKLKTVKELLGITIMERSSFEKDPVAFLEAKGYKEVKKDLIIKLPKYSLFELENGRKRMLASAGELQKGNELALPSKYVNFLYLASHYEKLKGKPEDNEQKQEYVEQHKHYLDEIIEQISEFSERVILADKNLSKVLSAYNEHRDKPISEQAENIIHLFTLTNLGAPAAFKYFDTTIDRKRYTSTKEVLDATLIHQSITGLYETRIDLSQLGGD

SEQ ID NO: 50 - protein, 1368 aa, synthetic construct
MKKKYSIGLDIGTNSVGWAVITDEYKVPSKKFKVLGNTDRHSIKKNLIGALLFDSGETAEATRLKRTARRRYTRRKNRIRYLQEIFAEEMAKVDDSFFQRLEESFLVEEDKKNERHPIFGNIVDEVAYHENYPTIYHLRKKLADSTEKADLRLIYLALAHIIKFRGHFLIEGDLNSENSDVQKLFEQLVQTYNQLFEEDPLNEEGIDAEAILSAKLSKSRRLENLIAQIPGEKKNGLFGNLIALSLGLTPNFKANFDLAEDAKLQLSKDTYDDDLENLLAQIGDQYADLFLAAKNLSDAILLSDILTVNGEITKAPLSASMIKRYDEHHQDLTLLKALVRKQLPEKYKEIFFDESKNGYAGYIDGGASQEEFYKYIKPILEKMDGAEEFLAKINREDFLRKQRTFDNGSIPHQIHLGELHAILRRQEKFYPFLKENQEKIEKILTFRIPYYVGPLARGNSRFAWMTRKSDETITPWNFEEVVDKEASAQAFIERMTNFDKNLPEEKVLPKHSLLYEYFTVYNELTKVKYVTEGMGKPEFLSSEQKKEIVDLLFKKNRKVTVKQLKEDYFKKIECFDTVEISGVEDRFNASLGTYHDLLKIIKDKEFLDNEENEDILEDIVLTLTLFEDKEMIEERLKKYADLFDKKVLKKLKRRRYTGWGRLSKKLINGIRDKQSGKTILDFLKSDGFANRNFMQLIHDDSLTFKEEIKKAQVIGQKDSLHEQIANLAGSPAIKKGILQTVKIVDELVKVMGRHAPENIVIEMARENQTTQKGQKNSRERMKRLEEGVKELGSKILKEHPVENTQLQNDKLYLYYLQNGKDMYTGEELDIDRLSDYDVDHIIPQSFIKDDSIDNKVLTSSAKARGKSDDVPSEEVVKKMKNYWRKLLKAKLISQRKFDNLTKAERGGLSELDKAGFIKRQLVETRQITKHVAQILDSRFNTERDENDKLIRDVKIITLKSKLVSDFRKDFQLYKVREINDYHHAHDAYLNAVVGTALIKKYPKLESEFVYGDYKVYDSYKMIGKSDQEIGKATAKRFFYSNIMNFFKTEITLANGEIRERPVIETNEETGEIVWDKEKDFATVRKVLSMPQVNIVKKTEVQTGGFSKESILPKRNSDKLIARKKDWDTKKYGGFDSPTVAYSVLVVAKVEKGKAKKLKTVKELVGITIMERSSFEKNPVAFLENKGYKDIQEDLIIKLPKYSLFELENGRKRLLASAGELQKGNELALPAKYVTFLYLASHYEKLKGSPEDEEKKRLYVEQHEHYFDEIIDQIIEFSKRYILADKNLEKILSLYNENRDKSISEQAESFINLFTLTALGAPAAFKFFDTTIDRKRYTSTKEILNATLIHQSITGLYETRIDLSKLGGD

SEQ ID NO: 51 - protein, 1368 aa, synthetic construct
MDKKYSIGLDIGTNSVGWAVITDEYKVPSKKFKVLGNTDRQSIKKNLIGALLFDSGETAEATRLKRTARRRYTRRKNRIRYLQEIFAEEMAKVDDSFFHRLEESFLVEEDKKHERHPIFGNIVDEVAYHEKYPTIYHLRKELADSTEKADLRLIYLALAHMIKFRGHFLIEGDLNPDNSDVDKLFIQLVQTYNQLFEENPINESGVDAKAILSAKLSKSRRLENLIAQLPGEKKNGLFGNLIALSLGLTPNFKSNFDLAEDAKLQLSKDTYDEDLDNLLAQIGDQYADLFLAAKNLSDAILLSDILTVNSEITKAPLSASMIKRYDEHHQDLTLLKALVRQQLPEKYKEIFFDQSKNGYAGYIDGGASQEEFYKFIKPILEKMDGTEELLAKLNREDFLRKQRTFDNGSIPHQIHLGELHAILRRQEDFYPFLKENREKIEKILTFRIPYYVGPLARGNSRFAWMTRKSEETITPWNFEEVVDKEASAQAFIERMTNFDKNLPNEKVLPKHSLLYEYFTVYNELTKVKYVTEGMKKPEFLSGEQKKEIVDLLFKKNRKVTVKQLKEDYFKKIECFDSVEISGVEDRFNASLGTYHDLLKIIKDKDFLDNEENEDILEDIVLTLTLFEDKEMIEERLKKYAHLFDDKVMKQLKRRRYTGWGRLSRKLINGIRDKQSGKTILDFLKSDGFANRNFMQLIHDDSLTFKEEIQKAQVKGQGDSLHEQIANLAGSPAIKKGILQTVKIVDELVKVMGRHKPENIVIEMARENQTTQKGQKNSRERMKRLEEGIKELGSQILKEHPVENTQLQNEKLYLYYLQNGKDMYTGQELDIDRLSDYDVDHIIPQSFIKDDSIDNKVLTSSDKARGKSDNVPSEEVVKKMKSYWRQLLNAKLISQRKFDNLTKAERGGLSELDKAGFIKRQLVETRQITKHVAQILDSRMNTEYDENDKLIRDVKIITLKSKLVSDFRKDFQFYKVREINNYHHAHDAYLNAVVGTALIKKYPKLESEFVYGDYKVYDVRKMIAKSEQEIGKATAKRFFYSNIMNFFKTEITLANGEIRKRPLIETNEETGEIVWDKGKDFATVRKVLSMPQVNIVKKTEVQTGGFSKESILPKRNSDKLIARKKDWDPKKYGGFDSPTVAYSVLVVAKVEKGKAKKLKTVKELVGITIMERSSFEKDPVAFLEAKGYKEIRKDLIIKLPKYSLFELENGRKRMLASAGELQKGNELALPSKYVTFLYLASHYEKLKGSPEDNEQKQLFVEQHKHYLDEIIEQISEFSKRYILADKNLEKILSLYNNNEDKSISEQAENIINLFTLTNLGAPAAFKFFDTTIDRKRYTSTKEILDATLIHQSITGLYETRIDLSQLGGD

SEQ ID NO: 52 - protein, 1368 aa, synthetic construct
MKKKYSIGLDIGTNSVGWAVITDDYKVPSKKFKVLGNTDRQSIKKNLIGALLFDSGETAEATRLKRTARRRYTRRKNRIRYLQEIFANEMAKVDDSFFHRLEESFLVEEDKKHERHPIFGNIVDEVAYHEKYPTIYHLRKKLVDSTEKADLRLIYLALAHMIKFRGHFLIEGDLNSDNSDVDKLFIQLVQTYNQLFEENPINEEGVDAKAILSAKLSKSRRLENLIAQLPGEKKNGLFGNLIALSLGLTPNFKSNFDLAEDAKLQLSKDTYDDDLENLLAQIGDQYADLFLAAKNLSDAILLSDILRVNTEITKAPLSASMIKRYDEHHQDLTLLKALVRKQLPEKYKEIFFDESKNGYAGYIDGGASQEEFYKFIKPILEKMDGTEELLAKLNREDLLRKQRTFDNGSIPHQIHLGELHAILRRQEEFYPFLKENREKIEKILTFRIPYYVGPLARGNSRFAWMTRKSEETITPWNFEEVVDKGASAQSFIERMTNFDENLPNEKVLPKHSLLYEYFTVYNELTKVKYVTEGMGKPEFLSGEQKKEIVDLLFKKNRKVTVKQLKEDYFKKIECFDSVEISGVEDRFNASLGTYHDLLKIIKDKDFLDNEENEDILEDIVLTLTLFEDREMIEERLKKYANLFDKKVMKQLKRRRYTGWGRLSRKLINGIRDKQSGKTILDFLKSDGFANRNFMQLIHDDSLTFKEEIKKAQVKGQGESLHEQIADLAGSPAIKKGILQTVKVVDELVKVMGRHKPENIVIEMARENQTTQKGQKNSRERMKRIEEGIKELGSQILKEHPVENTQLQNEKLYLYYLQNGRDMYTGQELDINRLSDYDVDHIVPQSFLKDDSIDNKVLTRSEKARGKSDNVPSEEVVKKMKNYWRQLLNAKLITQRKFDNLTKAERGGLSELDKAGFIKRQLVETRQITKHVAQILDSRMNTKYDENDKLIRDVKVITLKSKLVSDFRKDFQFYKVREINNYHHAHDAYLNAVVGTALIKKYPKLESEFVYGDYKKYDVRKMIAKSEQEIGKATAKYFFYSNIMNFFKSEIKLANGEIRKRPLIETNEETGEIVWDKERDFATVRKVLSMPQVNIVKKTEVQTGGFSKESILPKRKSDKLIARKKGWDPKKYGGFDSPTVAYSVLVVAKVEKGKAKKLKTVKELLGITIMERSSFEKDPVAFLEAKGYKEVKKDLIIKLPKYSLFELENGRKRMLASAGELQKGNELALPSKYVNFLYLASHYEKLKGKPEDNEKKQLYVEQHKHYLDEIIEQISEFSERVILADKNLDKVLSAYNNIRDKSIKEQAENIIHLFTLTNLGAPAAFKYFGTTIDRKRYTSTKEVLNATLIHQSITGLYETRIDLSQLGGD

SEQ ID NO: 53 - protein, 1368 aa, synthetic construct
MDKKYSIGLDIGTNSVGWAVITDEYKVPSKKFKVLGNTDRHSIKKNLIGALLFDSGETAEATRLKRTARRRYTRRKNRICYLQEIFSNEMAKVDDSFFHRLEESFLVEEDKKHERHPIFGNIVDEVAYHEKYPTIYHLRKKLADSTEKADLRLIYLALAHMIKFRGHFLIEGDLNPDNSDVDKLFIQLVQTYNQLFEENPINEEGVDAKAILSAKLSKSRRLENLIAQFPGEKRNGLFGNLIALSLGLTPNFKSNFDLAEDAKLQLSKDTYDEDLDNLLAQIGDQYADLFLAAKNLSDAILLSDILTVNSEITKAPLSASMIKRYDEHHQDLTLLKALVRQQLPEKYKEIFFDESKNGYAGYIDGGASQEEFYKFIKPILEKMDGTEELLAKLNREDFLRKQRTFDNGSIPHQIHLGELHAILRRQEEFYPFLKENREKIEKILTFRIPYYVGPLARGNSRFAWMTRKSDETITPWNFEEVVDKGASAQAFIERMTNFDKNLPTEKVLPKHSLLYEYFTVYNELTKVKYVTEGMRKPEFLSGEQKQEIVDLLFKKNRKVTVKQLKEDYFKKIECFDSVEISGVEDRFNASLGTYHDLLKIIKDKDFLDNEENEDILEDIVLTLTLFEDREMIEERLKKYANLFDKKVLKKLKRRRYTGWGRLSKKLINGIRDKQSGKTILDFLKSDGFANRNFMQLIHDDSLTFKEEIKKAQVSGQGDSLHEHIANLAGSPAIKKGILQTVKVVDELVKVMGRHKPENIVIEMARENQTTQKGQKNSRERMKRIEEGIKELGSQILKEHPVENTQLQNEKLYLYYLQNGRDMYVDQELDINRLSDYDVDHIVPQSFLKDDSIDNKVLTRSDKARGKSDNVPSEEVVKKMKNYWRQLLNAKLITQRKFDNLTKAERGGLSELDKAGFIKRQLVETRQITKHVAQILDSRMNTKYDENDKLIREVKVITLKSKLVSDFRKDFQFYKVREINNYHHAHDAYLNAVVGTALIKKYPKLESEFVYGDYKVYDVRKMIAKSEQEIGKATAKYFFYSNIMNFFKTEITLANGEIRKRPLIETNGETGEIVWDKGRDFATVRKVLSMPQVNIVKKTEVQTGGFSKESILPKRDSDKLIARKKDWDTKKYGGFDSPTVAYSVLVVAKVEKGKTKKLKTVKELVGITIMERSSFEKDPVAFLEAKGYKEVQEDLIIKLPKYSLFELENGRKRMLASAGELQKGNELALPNKYVTFLYLASHYEKLKGKPEDEEQKQLYVEQHLDYFDEILDQISEFSKRYILADKNLEKILSLYNEFEDYSISEQAESFINLFTFTALGAPAAFKFFGTTIDRKRYTSTKEILDSTLIHQSITGLYETRIDLSQLGGD

SEQ ID NO: 54 - protein, 1368 aa, synthetic construct
MDKKYSIGLDIGTNSVGWAVITDEYKVPSKKFKVLGNTDRHSIKKNLIGALLFDSGETAEATRLKRTARRRYTRRKNRICYLQEIFSNEMAKVDDSFFHRLEESFLVEEDKKHERHPIFGNIVDEVAYHEEYPTIYHLRKKLADSTEKADLRLIYLALAHIIKFRGHFLIEGDLNSENSDVQKLFIQLVQTYNQLFEENPINEEGVDAKAILSAKLSKSRRLENLIAQFPGEKKNGLFGNLIALSLGLTPNFKSNFGLSEDAKLQLSKDTYDEDLENLLGQIGDQYADLFLAAKNLSDAILLSDILTVNDEITKAPLSASMIKRYDEHHQDLTLLKTFVRQQLPEKYKEIFFDPSKNGYAGYIDGGASQEEFYKYIKPILEKLDGTEELLAKINREDFLRKQRTFDNGSIPHQIHLGELHAILRRQEEYYPFLKENREKIEKILTFRIPYYVGPLARGNSRFAWMTRKSDETITPWNFEEVVDKGASAQAFIERMTNFDKNLPTEKVLPKHSLLYEYFTVYNELTKVKYVTEGMGKPEFFSGNQKQEIVDGLFKKDRKVTVKQLKEFLFKEFDEFRSVEISGVEDAFNASLGTYHDLLKIIKDKDFLDNEENEDILEDIVLTLTLFEDKEMIEERLKKYADLFDDKVLKQLKRRRYTGWGRLSRKLINGIRDKQSGKTILDFLKSDGFANRNFMQLIHDDSLTFKEEIKKAQVSGQGDSLHEHIANLAGSPAIKKGILQTVKVVDELVKVMGRHKPENIVIEMARENQTTQKGQKNSRERMKRIEEGIKELGSQILKEHPVENTQLQNEKLYLYYLQNGRDMYVDQELDINRLSDYDVDHIVPQSFLKDDSIDNKVLTRSDKARGKSDNVPSEEVVKKMKNYWRQLLNAKLITQRKFDNLTKAERGGLSELDKAGFIKRQLVETRQITKHVAQILDSRMNTKYDENDKLIREVKVITLKSKLVSDFRKDFQFYKVREINNYHHAHDAYLNAVVGTALIKKYPKLESEFVYGDYKVYDVRKMIAKSEQEIGKATAKYFFYSNIMNFFKTEITLANGEIRKRPLIETNGETGEIVWDKGRDFATVRKVLSMPQVNIVKKTEVQTGGFSKESILPKRNSDKLIARKKDWDPKKYGGFDSPTVAYSVLVVAKVEKGKSKKLKSVKELLGITIMERSSFEKNPIDFLEAKGYKEVKKDLIIKLPKYSLFELENGRKRMLASAGELQKGNELALPSKYVNFLYLASHYEKLKGSPEDNEQKQLFVEQHKHYLDEIIEQISEFSKRVILADANLDKVLSAYNKHRDKPIREQAENIIHLFTLTNLGAPAAFKYFDTTIDRKRYTSTKEVLDATLIHQSITGLYETRIDLSQLGGD

SEQ ID NO: 55 - protein, 1368 aa, synthetic construct
MDKKYSIGLDIGTNSVGWAVITDEYKVPSKKFKVLGNTDRHSIKKNLIGALLFDSGETAEATRLKRTARRRYTRRKNRICYLQEIFSNEMAKVDDSFFHRLEESFLVEEDKKHERHPIFGNIVDEVAYHEKYPTIYHLRKKLADSTEKADLRLIYLALAHIIKFRGHFLIEGDLNSENSDVDKLFIQLVQTYNQLFEENPINEEGVDAKAILSARLSKSRRLENLIAQFPGEKKNGLFGNLIALSLGLTPNFKSNFDLSEDAKLQLSKDTYDDDLDNLLAQIGDQYADLFLAAKNLSDAILLSDILTVNSEITKAPLSASMIKRYDEHHQDLTLLKALVRQQLPEKYKEIFFDKSKNGYAGYIDGGASQEEFYKFIKPILEKMDGTEELLAKINREDFLRKQRTFDNGSIPHQIHLGELHAILRRQEEFYPFLKENREKIEKILTFRIPYYVGPLARGNSRFAWMTRKSEETITPWNFEEVVDKEASAQAFIERMTNFDKNLPNEKVLPKHSLLYEYFTVYNELTKVKYVTEGMRKPEFLSAEQKQEIVDLLFKKNRKVTVKQLKEDYFKKIECFDSVEISGVEDRFNASLGTYHDLLKIIKDKDFLDNEENEDILEDIVLTLTLFEDKEMIEKRLSKYANLFDKKVLKQLKRRRYTGWGRLSRKLINGIRDKQSGKTILDFLKSDGFANRNFMQLIHDDSLTFKEAIKKAQVKGQGDSLHEHIANLAGSPAIKKGILQTVKVVDELVKVMGRHKPENIVIEMARENQTTQKGQKNSRERMKRIEEGLKELGSQILKEHPVENTQLQNEKLYLYYLQNGKDMYTGQELDIDRLSDYDVDHIIPQSFIKDDSIDNKVLTSSEKARGKSDNVPSEEVVKKMKNYWRQLLKAKLISQRKFDNLTKAERGGLSELDKAGFIKRQLVETRQITKHVAQILDSRMNTKYDENDKLIREVKVITLKSKLVSDFRKDFQFYKVREINNYHHAHDAYLNAVVGTALIKKYPKLESEFVYGDYKVYDVRKMIAKSEQEIGKATAKYFFYSNIMNFFKTEITLANGEIRKRPLIETNGETGEIVWDKGRDFATVRKVLSMPQVNIVKKTEVQTGGFSKESILPKRNSDKLIARKKDWDPKKYGGFDSPTVAYSVLVVAKVEKGKAKKLKTVKELVGITIMERSSFEKDPIAFLEAKGYKEIQKDLIIKLPKYSLFELENGRKRLLASAGELQKGNELALPSKYVTFLYLASHYEKLKGSPEDNEKKQLYVEQHLHYFDEILDQISEFSERYILADKNLEKILELYNKNEDYSISEQAESIINLFTLTALGAPAAFKFFGTTIDRKRYTSTKEILDSTLIHQSITGLYETRIDLSQLGGD

SEQ ID NO: 56 - protein, 1368 aa, synthetic construct
MKKKYSIGLDIGTNSVGWAVITDEYKVPSKKFKVLGNTDRHSIKKNLLGALLFDSGETAEATRLKRTARRRYTRRKNRIRYLQEIFASEMAKVDDSFFHRLEESFLVEEDKKHERHPIFGNIVDEVAYHEKYPTIYHLRKKLADSTEKADLRLIYLALAHMIKFRGHFLIEGDLNPDNSDVDKLFIQLVQTYNQLFEENPINESGVDAKAILSARLSKSRRLENLIAQLPGEKRNGLFGNLIALSLGLTPNFKSNFDLAEDAKLQLSKDTYDEDLDNLLGQIGDQYADLFLAAKNLSDAILLSDILTVNSEITKAPLSASMIKRYDEHHQDLTLLKALVRQQLPEKYKEIFFDESKNGYAGYIDGGASQEEFYKFIKPILEKMDGTEELLAKLNREDFLRKQRTFDNGSIPHQIHLGELHAILRRQEDFYPFLKENREKIEKILTFRIPYYVGPLARGNSRFAWMTRKSEETITPWNFEEVVDKGASAQAFIERMTNFDKNLPTEKVLPKHSLLYEYFTVYNELTKVKYVTEGMRKPEFLSGEQKKAIVDLLFKKNRKVTVKQLKEDYFKKIECFDSVEISGVEDRFNASLGTYHDLLKIIKDKDFLDNEENEDILEDIVLTLTLFEDREMIEERLKKYANLFDKKVLKQLKRRRYTGWGRLSRKLINGIRDKQSGKTILDFLKSDGFANRNFMQLIHDDSLTFKEIIKKAQVSGQGDSLHEQIANLAGSPAIKKGILQTVKIVDELVKVMGRHKPENIVIEMARENQTTQKGQKNSRERMKRIEEGIKELGSQILKEHPVENTQLQNEKLYLYYLQNGKDMYTGQELDIDRLSDYDVDHIIPQSFIKDDSIDNKVLTRSDKARGKSDNVPSEEVVKKMKNYWRQLLNAKLISQRKFDNLTKAERGGLSELDKAGFIKRQLVETRQITKHVAQILDSRMNTKYDENDKLIRDVKIITLKSKLVSDFRKDFQFYKVREINNYHHAHDAYLNAVVGTALIKKYPKLESEFVYGDYKVYDVRKMIAKSEQEIGKATAKRFFYSNIMNFFKTEITLANGEIRKRPLIETNEETGEIVWDKEKDFATVRKVLSMPQVNIVKKTEVQTGGFSKESILPKRNSDKLIARKKDWDPKKYGGFDSPTVAYSVLVVAKVEKGKSKKLKTVKELVGITIMERSSFEKDPVAFLEAKGYKEVQKDLIIKLPKYSLFELENGRKRLLASAGELQKGNELALPSKYVTFLYLASHYEKLKGSPEDNEKKQLFVEQHRHYLDEIIDQISEFSKRYILADKNLDKLLSLYNNHRDKSISEQAENFINLFTLTNLGAPAAFKFFDTTIDRKRYTSTKEILDSTLIHQSITGLYETRIDLSQLGGD

SEQ ID NO: 57 - protein, 1368 aa, synthetic construct
MKKKYSIGLDIGTNSVGWAVITDEYKVPSKKFKVLGNTDRQSIKKNLLGALLFDSGETAEATRLKRTARRRYTRRKNRIRYLQEIFAEEMNKVDDSFFHRLEESFLVEEDKKGERHPIFGNIVDEVAYHEKYPTIYHLRKKLADSTEKADLRLIYLALAHMIKFRGHFLIEGDLNPDNSDVDKLFIQLVQTYNQLFEESPINEEGVDAKAILSAKLSKSRRLENLIAQIPGEKRNGLFGNLIALSLGLTPNFKSNFDLAEDAKLQLSKDTYDEDLDNLLAQIGDQYADLFLAAKNLSDAILLSGILTVNDENTKAPLSASMIKRYDEHHQDLTLLKQLVRQQLPEKYKEIFFDDSKNGYAGYIDGGASQEDFYKYIKPILEKLDGAEELLAKLNREDFLRKQRTFDNGSIPHQIHLGELHAILRRQEDFYPFLKENREKIEKILTFRIPYYVGPLARGNSRFAWMTRKSDETITPWNFEEVVDKEASAQAFIERMTNFDKNLPSEKVLPKHSLLYEYFTVYNELTKVKYITEGMGKPEFLSAEQKKEIVDLLFKKNRKVTVKQLKEDYFKKIECFDSVEISGVEDRFNASLGTYHDLLKIIKDKDFLDNEENEDILEDIVLTLTLFEDKEMIEERLEKYAHLFDDKVLKQLKRRRYTGWGRLSKKLINGIRDKQSGKTILDFLKSDGFANRNFMQLIHDDSLTFKEEIQKAQVIGQGDSLHEQIADLAGSPAIKKGILQSIKIVDELVKVMGRHAPENIVIEMARENQTTQKGQKNSRERMKRIEEGIKELGSQILKEHPVENTQLQNEKLYLYYLQNGRDMYVDQELDINRLSDYDVDHIVPQSFLKDDSIDNKVLTRSDKARGKSDNVPSEEVVKKMKNYWRQLLNAKLITQRKFDNLTKAERGGLSELDKAGFIKRQLVETRQITKHVAQILDSRMNTKRDENDKLIREVKIITLKSKLVSDFRKDFGFYKVREINDYHHAHDAYLNAVVGLALIKKYPKLESEFVYGDYKVYDVRKMIAKSEQEIGKATAKYFFYSNIMNFFKSEITLANGEIRKRPQIETNEETGEIVWNKVKDFATVRKVLSMPQVNIVKKTEVQTGGFSKESILPKRESDKLIARKKDWDPKKYGGFDSPTVAYSVLVVAKVEKGKAKKLKTVKELVGITIMERSSFEKDPVAFLEAKGYKNIQKDLIIKLPKYSLFELENGRKRLLASAGELQKGNELALPAKYVTLLYLASNYEKLKGSPEDNEQKLEYVEQHKEYFKEILDQIIEFSSRYILADKNLDKVKSLYAEHRDKDITELAENFIHLFTLTSLGAPAAFKFFGTTIDRKRYTSTSEILNATLIHQSITGLYETRIDLSQLGGD

SEQ ID NO: 58 - protein, 1368 aa, synthetic construct
MDKKYSIGLDIGTNSVGWAVITDEYKVPSKKFKVLGNTDRKSIKKNLIGALLFDSGETAEATRLKRTARRRYTRRKNRICYLQEIFSEEMAKVDDSFFHRLEESFLVEEDKRHERHPIFGNIVEEVAYHEKYPTIYHLRKKLVDSDDKADLRLIYLALAHMIKFRGHFLIEGDLNPDNSDVDKLFIQLVQTYNQLFEENPIDAEKVDAEAILTERLSKSRRLENLIAELPGEKKNGLFGNLIALSLGLTPNFKSNFDLSEDAKLQLSKDTYDEDLENLLGQIGDQYADLFLAAKNLSDAILLSDILRVNTEITKAPLSASMIKRYDEHHQDLTLLKALVRQQLPEKYKEIFFDQSKNGYAGYIDGGASQEEFYKFIKPILEKMDGTEELLVKLNREDLLRKQRTFDNGSIPHQIHLQELHAILRRQEDFYPFLKDNREKIEKILTFRIPYYVGPLARGNSRFAWMTRKSDETITPWNFDEVVDKGASAQSFIERMTNFDKNLPNEKVLPKHSLLYEYFTVYNELTKVKYVTEGMRKPAFLDGEQKKEIVDLLFKTNRKVTVKQLKEDYFKKIDCFDIVEISGVEDRFNASLGTYHDLLKIIKDKDFLDNEENEDILEDIVLTLTLFEDREMIEKRLKTYANLFDKKVMKQLKRRRYTGWGRLSRKLINGIRDKQSGKTILDFLKSDGFTNRNFMQLIHDDSLTFKEDIQKAQVSGQGDSLHEQIANLAGSPAIKKGILQTIKVVDELVKVMGRHKPENIVIEMARENQTTQKGQKNSRERMKRIEEGIKELGSKILKEHPVENTQLQNEKLYLYYLQNGRDMYTDQELDINRLSDYDVDHIVPQSFLKDDSIDNKVLTSSEKARGKSDDVPSEEVVKKMKPYWRQLLNAKLITQRKFDNLTKAERGGLSELDKAGFIKRQLVETRQITKHVAQILDSRMNTKYDENDKLIRDVKVITLKSKLVSDFRKDFQFYKVREINNYHHAHDAYLNAVVGTALIKKYPKLESEFVYGDYKVYDVRKMVAKSEQEIGKATAKYFFYSNIMNFFKTEVKLADGEIRKRPLIEVNEETGEIVWDKGRDFATVRKVLSMPQVNIVKKTEVQTGGFSKESILPKRNSDKLIARKKDWDPSKYGGFDSPTVAYSVLVIAKIEKGKAKKLKSVKELLGITIMERSSFEKNPVDFLEAKGYQNIQKELIIKLPKYSLFELENGRKRLLASAGELQKGNELALPNKYVTFLYHAQHYEKLKGKPEDEEYKQLFVEQHRHYFDEILEQIIEFSERYILADANLEKIKNLYDQHFDASLREQASNIINLFTFTNLGAPAAFKYLDTDIDRKRYTSTKEILNATLIHQSITGLYETRIDLSQLGGD

SEQ ID NO: 59 - protein, 1368 aa, synthetic construct
MKKKYSIGLDIGTNSVGWAVITDEYKVPSKKFKVLGNTDRQSIKKNLIGALLFDSGETAEATRLKRTARRRYTRRKNRIRYLQEIFAEEMSKVDDSFFHRLEESFLVEEDKRGERHPIFGNIVDEVAYHEKYPTIYHLRKELVDSTEKADLRLIYLALAHMIKFRGHFLIEGDLNSENTDVQKLFKQLVQAYNQLFEESPLNEETVDAKAILTEKLSKSRRLENLIAQLPGEKKNGLFGNLIALSLGLTPNFKTNFGLAEDAKLQLSKDTYDEDLENLLGQIGDQYADLFLAAKNLSDAILLSDILRVNDEITKAPLSASMIKRYDEHHQDLTLLKTLVREQLPEKYKEIFFDKSKNGYAGYIDGGASQEEFYKYIKPILEKMDGTEYLLAKLEREDLLRKQRTFDNGSIPHQIHLGELHAILRRQEEYYPFLKENQEKIEKILTFRIPYYVGPLARGNSRFAWMSRKSDETITPWNFEEVVDKGASAQAFIERMTNFDKNLPNEKVLPKHSLLYEKFTVYNELTKVKYVTEGMGKPEFLDAEQKKEIVDGLFKKYRKVTVKKLKEFYFKEFDEFRIVDISGVEDRFNASLGTYHDLLKIIKDKDFLDNDENEDILEDIVLTLTLFEDREMIEERLKKYADLFDDKVMKQLKRRRYTGWGRLSKKLINGIRDKQSGKTILDFLKSDGFANRNFMQLIHDDSLTFKEEIKKAQVKGQKDSLHEQIADLAGSPAIKKGILQTVKVVDELVKVMGRHKPENIVIEMARENQTTQKGQKNSRERYKRIEEGIKELGSQILKEHPVENTQLQNDKLYLYYLQNGRDMYTGEELDIDRLSDYDVDHIVPQSFIKDDSIDNKVLTRSAEARGKSDNVPSEEVVKKMKSYWRQLLKAKLITQRKFDNLTKAERGGLTELDKAGFIKRQLVETRQITKHVAQILDSRMNTERDENDKLIRDVKVITLKSKLVSDFRKDFGFYKVREINDYHHAHDAYLNAVVGTALIKKYPKLESEFVYGDYKVYDSYKMIAKSEQEIGKATAKYFFYSNIMNFFKTEITLANGEIRKRPLIETNGETGEIVWDKGRDFATVRKVLSMPQVNIVKKTEVQTGGFSKESILPKRNSDKLIARKKDWDPKKYGGFDSPTVAYSVLVVAKVEKGKSKKLKSVKELLGITIMERSSFEKNPIDFLEAKGYKEVKKDLIIKLPKYSLFELENGRKRMLASAGELQKGNELALPSKYVNFLYLASHYEKLKGSPEDNEQKQLFVEQHKHYLDEIIEQISEFSKRVILADANLDKVLSAYNKHRDKPIREQAENIIHLFTLTNLGAPAAFKYFDTTIDRKRYTSTKEVLDATLIHQSITGLYETRIDLSQLGGD

SEQ ID NO: 60 - protein, 1368 aa, synthetic construct
MKKKYSIGLDIGTNSVGWAVITDEYKVPSKKFKVLGNTDRQSIKKNLIGALLFDSGETAEATRLKRTARRRYTRRKNRIRYLQEIFAEEMAKVDDSFFHRLEESFLVEEDKKHERHPIFGNIVDEVAYHEKYPTIYHLRKKLVDSTEKADLRLIYLALAHMIKFRGHFLIEGDLNSENSDVDKLFIQLVQTYNQLFEENPINESGVDAKAILSAKLSKSRRLENLIAQLPNEKKNGLFGNLIALSLGLTPNFKSNFDLAEDAKLQLSKDTYDDDLDNLLAQIGDQYADLFLAAKNLSDAILLSDILRVNTEITKAPLSASMIKRYDEHHQDLTLLKALVRQQLPEKYKEIFFDKSKNGYAGYIDGGASQEDFYKFIKPILEKMDGTEELLAKLNREDLLRKQRTFDNGSIPHQIHLGELHAILRRQEDFYPFLKENREKIEKILTFRIPYYVGPLARGNSRFAWMTRKSEETITPWNFEEVVDKGASAQSFIERMTNFDKNLPNEKVLPKHSLLYEYFTVYNELTKVKYVTEGMGKPEFLSGEQKKEIVDLLFKKNRKVTVKQLKEFYFKKIECFDSVEISGVEDRFNASLGTYHDLLKIIKDKDFLDNEENEDILEDIVLTLTLFEDREMIEERLKKYANLFDKKVMKQLKRRRYTGWGRLSRKLINGIRDKQSGKTILDFLKSDGFANRNFMQLIHDDSLTFKEEIKKAQVSGQGESLHEQIANLAGSPAIKKGILQTVKVVDELVKVMGRHKPENIVIEMARENQTTQKGQKNSRERMKRIEEGIKELGSQILKEHPVENTQLQNDKLYLYYLQNGRDMYTGQELDINRLSDYDVDHIVPQSFLKDDSIDNKVLTRSAEARGKSDNVPSEEVVKKMKNYWRQLLKAKLITQRKFDNLTKAERGGLSELDKAGFIKRQLVETRQITKHVAQILDSRMNTKYDENDKLIRDVKVITLKSKLVSDFRKDFQFYKVREINNYHHAHDAYLNAVVGTALIKKYPKLESEFVYGDYKVYDVRKMIGKSEQEIGKATAKYFFYSNIMNFFKTEITLANGEIRKRPLIETNEETGEIVWDKERDFATVRKVLSMPQVNIVKKTEVQTGGFSKESILPKRESDKLIARKKDWDPKKYGGFDSPTVAYSVLVVAKVEKGKSKKLKTVKELLGITIMERSSFEKDPVAFLEAKGYKEVKKDLIIKLPKYSLFELENGRKRMLASAGELQKGNELALPSKYVNFLYLASHYEKLKGSPEDNEKKQEYVEQHKHYLDEIIDQISEFSERVILADKNLEKVLSAYNEHRNKSIEEQAENIIHLFTLTNLGAPAAFKYFGTTIDRKRYTSTKEVLNATLIHQSITGLYETRIDLSQLGGD

SEQ ID NO: 61 - protein, 1368 aa, synthetic construct
MDKKYSIGLDIGTNSVGWAVITDEYKVPSKKFKVLGNTDRHSIKKNLIGALLFDSGETAEATRLKRTARRRYTRRKNRIRYLQEIFSNEMAKVDDSFFHRLEESFLVEEDKKHERHPIFGNIVDEVAYHEKYPTIYHLRKKLADSTEKADLRLIYLALAHMIKFRGHFLIEGDLNSDNSDVDKLFIQLVQTYNQLFEENPINEEGVDAKAILSARLSKSRRLENLIAQFPGEKKNGLFGNLIALSLGLTPNFKSNFDLAEDAKLQLSKDTYDEDLENLLGQIGDQYADLFLAAKNLSDAILLSDILTVNDEITKAPLSASMVKRYDEHHQDLTLLKKLVRQQLPEKYKEIFFDQSKNGYAGYIDGGASQEEFYKYIKPILEKMDGSEEFLEKINREDFLRKQRTFDNGSIPHQIHLGELHAILRRQEKYYPFLKDNREKIEKILTFRIPYYVGPLARGNSRFAWMTRKSEETITPWNFEEVVDKEASAQKFIERMTNFDKNLPNEKVLPKHSLLYEYFTVYNELTKVKYVTEGMRKPEFLSGEQKKEIVDLLFKKNRKVTVKQLKEDYFKKIECFDSVEISGVEDRFNASLGTYHDLLKIIKDKDFLDNEENEDILEDIVLTLTLFEDREMIEERLKKYAHLFDDKVLKQLKRRRYTGWGRLSRKLINGIRDKQSGKTILDFLKSDGFANRNFMQLIHDDSLTFKEEIKKAQVSGQGDSLHEQIANLAGSPAIKKGILQTVKIVDELVKVMGRHKPENIVIEMARENQTTQKGQKNSRERMKRLEEGIKELGSKILKEHPVENTQLQNEKLYLYYLQNGKDMYTGEELDIDRLSDYDVDHIVPQSFLKDDSIDNKVLVSSEKARGKSDNVPSEEVVKKMKNYWRQLLEAKLITQRKFDNLTKAERGGLTELDKAGFIKRQLVETRQITKHVAQILDSRFNTKYDENDKLIRDVKIITLKSKLVSDFRKDFQFYKVREINNYHHAHDAYLNAVVGTALIKKYPKLESEFVYGDYKVYDVRKMIAKSEQEIGKATAKYFFYSNIMNFFKTEITLANGEIRKRPLIETNEETGEIVWDKEKDFATVRKVLSMPQVNIVKKTEVQTGGFSKESILPKRNSDKLIARKKDWDPKKYGGFDSPTVAYSVLVVAKVEKGKSKKLKTVKELVGITIMERSSFEKNPIDFLEAKGYKEVKKDLIIKLPKYSLFELENGRKRMLASAGELQKGNELALPSKYVTLLYLASHYEKLKGSPEDNEQKQLFVEQHKHYFDEIIEQISEFSKRVILADANLEKILSLYNKNRDKSIEEQAENFINLFTFTNLGAPAAFKFFDTTIDRKRYTSTKEILDATLIHQSITGLYETRIDLSQLGGD

SEQ ID NO: 62 - protein, 1368 aa, synthetic construct
MDKKYSIGLDIGTNSVGWAVITDEYKVPSKKFKVLGNTDRHSIKKNLIGALLFDSGETAEATRLKRTARRRYTRRKNRICYLQEIFSNEMAKVDDSFFHRLEESFLVEEDKRHERHPIFGNIVDEVAYHEKYPTIYHLRKKLADSDEKADLRLIYLALAHMIKFRGHFLIEGDLNSENSDVQKLFKQLVQTYNQLFEESPLNEEGVDAKAILTEKLSKSRRLENLIAQFPGEKKNGLFGNLIALSLGLTPNFKSNFDLSEDAKLQFSKDTYDEDLENLLGQIGDQYADLFLAAKNLYDAILLSGILTVNDEITKAPLSASMVKRYDEHHQDLTLLKQFVRQQLPEKYKEIFFDQSKNGYAGYIDGGASQEEFYKYLKKILEKIDGSEEFLEKINREDFLRKQRTFDNGSIPHQIHLQELHAILRRQEKYYPFLKENQEKIEKILTFRIPYYVGPLARGNSRFAWMSRKSDETITPWNFEDVVDKEASAEKFIERMTNFDKNLPEEKVLPKHSLLYEKFTVYNELTKVKYVTEGMRKPVFFSAEQKQEIVDLLFKKNRKVTKKQLKEYLFKEFECFDSVEISGVEDRFNASLGTYHDLLKIIKDKDFLDNPENEKILEDIVLTLTLFEDREMIKKRLEKYADLFDKKQLKKLKRRRYTGWGRLSAKLINGIRDKQSGKTILDYLIEDGFANRNFMQLIHDDSLTFKEEIEKAQVIGQGDSLHEHIANLAGSPAIKKGILQTVKVVDELVKVMGRHKPENIVIEMARENQTTQKGQKNSRERMKRIEEGIKELGSQILKEHPVENTQLQNEKLYLYYLQNGRDMYVDQELDINRLSDYDVDHIVPQSFLKDDSIDNKVLTRSDKARGKSDNVPSEEVVKKMKNYWRQLLNAKLITQRKFDNLTKAERGGLSELDKAGFIKRQLVETRQITKHVAQILDSRMNTKYDENDKLIREVKVITLKSKLVSDFRKDFQFYKVREINNYHHAHDAYLNAVVGTALIKKYPKLESEFVYGDYKVYDVRKMIAKSEQEIGKATAKYFFYSNIMNFFKTEITLANGEIRKRPLIETNGETGEIVWDKGRDFATVRKVLSMPQVNIVKKTEVQTGGFSKESILPKRNSDKLIARKKDWDPKKYGGFDSPTVAYSVLVVAKVEKGKSKKLKSVKELLGITIMERSSFEKNPIDFLEAKGYKEVKKDLIIKLPKYSLFELENGRKRMLASAGELQKGNELALPSKYVNFLYLASHYEKLKGSPEDNEQKQLFVEQHKHYLDEIIEQISEFSKRVILADANLDKVLSAYNKHRDKPIREQAENIIHLFTLTNLGAPAAFKYFDTTIDRKRYTSTKEVLDATLIHQSITGLYETRIDLSQLGGD

SEQ ID NO: 63 - protein, 1368 aa, synthetic construct
MDKKYSIGLDIGTNSVGWAVITDEYKVPSKKFKVLGNTDRHSIKKNLIGALLFDSGETAEATRLKRTARRRYTRRKNRICYLQEIFSNEMAKVDDSFFHRLEESFLVEEDKKHERHPIFGNIVDEVAYHEKYPTIYHLRKKLADSTEKADLRLIYLALAHIIKFRGHFLIEGDLNSDNSDVDKLFIQLVQTYNQLFEENPINESGVDAKAILSAKLSKSRRLENLIAQLPGEKKNGLFGNLIALSLGLTPNFKSNFDLSEDAKLQLSKDTYDDDLDNLLAQIGDQYADLFLAAKNLSDAILLSDILTVNSEITKAPLSASMIKRYDEHHQDLTLLKALVRQQLPEKYKEIFFDQSKNGYAGYIDGGASQEEFYKFIKPILEKMDGTEELLEKLNREDFLRKQRTFDNGSIPHQIHLGELHAILRRQEDFYPFLKENREKIEKILTFRIPYYVGPLARGNSRFAWMTRKSDETITPWNFEEVVDKGASAQAFIERMTNFDKNLPDEKVLPKHSLLYEYFTVYNELTKVKYVTEGMRKPEFLSGEQKKEIVDLLFKKNRKVTVKQLKEDLFKEIECFDSVEISGVEDRFNASLGTYHDLLKIIKDKDFLDNEENEDILEDIVLTLTLFEDREMIEERLKKYANLFDKKVLKQLKRRRYTGWGRLSRKLINGIRDKQSGKTILDFLKSDGFANRNFMQLIHDDSLTFKEEIQKAQVIGQGDSLHEHIANLAGSPAIKKGILQTVKVVDELVKVMGRHKPENIVIEMARENQTTQKGQKNSRERMKRIEEGIKELGSQILKEHPVENTQLQNEKLYLYYLQNGRDMYVDQELDINRLSDYDVDHIVPQSFLKDDSIDNKVLTRSDKARGKSDNVPSEEVVKKMKNYWRQLLNAKLITQRKFDNLTKAERGGLSELDKAGFIKRQLVETRQITKHVAQILDSRMNTKYDENDKLIREVKVITLKSKLVSDFRKDFQFYKVREINNYHHAHDAYLNAVVGTALIKKYPKLESEFVYGDYKVYDVRKMIAKSEQEIGKATAKYFFYSNIMNFFKTEITLANGEIRKRPLIETNGETGEIVWDKGRDFATVRKVLSMPQVNIVKKTEVQTGGFSKESILPKRNSDKLIARKKDWDTKKYGGFDSPTVAYSVLVVAKVEKGKAKKLKTVKELVGITIMERSSFEKDPVSFLEAKGYKEVQKDLIIKLPKYSLFELENGRKRLLASAGELQKGNELALPSKYVTFLYLAKHYEKLKGSPEDNEQKQLYVEQHKNYFDEILDQISEFSKRYILADANLEKILSLYSNNEDKPISEQASSFINLFTLTNLGAPAAFKFFDTTIDRKRYTSTKEILNATLIHQSITGLYETRIDLSQLGGD

SEQ ID NO: 64 - protein, 1368 aa, synthetic construct
MDKKYSIGLDIGTNSVGWAVITDEYKVPSKKFKVLGNTDRHSIKKNLIGALLFDSGETAEATRLKRTARRRYTRRKNRICYLQEIFSNEMAKVDDSFFHRLEESFLVEEDKKNERHPIFGNIVDEKAYHEKYPTIYHLRKKLADSDEKADLRLIYLALAHMIKFRGHFLIEGDLNSDNSDVQKLFKQLVQTYNQLFEENPLNEETVDAKAILTEKLSKSRRLENLIAQFPGEKKNGLFGNLIALSLGLTPNFKSNFDLAEDAKLQLSKDTYDEDLENLLGQIGDEYADLFLAAKNLYDAILLSDILTVNDEITKAPLSASMVKRYEEHQKDLKLLKKFVRQQLPEKYKEIFSDKSKNGYAGYIDGGTSQEEFYKYLKKILEKMDGSEEFLEKIEREDFLRKQRTFDNGSIPHQIHLQELHAILRRQEEYYPFLKENREKIEKILTFRIPYYVGPLARGNSRFAWMTRKSDEKITPWNFDEVVDKEASAQKFIERMTNNDLYLPEEKVLPKHSLLYEKFTVYNELTKVKYVTEGMRKPEFFSAEQKQEIFDLLFKKNRKVTKKKLKEYLFKKFECFDIVEISGLEDRFNASLGTYHDLLKIIKDKDFLDNEENEEILEDIVLTLTLFEDREMIKKRLKKYADLFDDKVLKKLKRRHYTGWGRLSKKLINGIRDKQSGKTILDYLISDGFANRNFMQLIHDDSLTFKEEIEKAQVSGDGDSLHEHIANLAGSPAIKKGILQTVKVVDELVKVMGRHKPENIVIEMARENQTTQKGQRNSRQRLKRLEEGIKELGSDILKEHPVENTQLQNDRLYLYYLQNGKDMYTGEELDIDRLSDYDIDHIIPQSFIKDDSIDNKVLVSSKKARGKSDNVPSEEVVKKMKNYWRKLLDAKLISQRKFDNLTKAERGGLSELDKAGFIKRQLVETRQITKHVAQILDSRMNTKYDENDKLIREVKVITLKSKLVSDFRKDFQFYKVREINNYHHAHDAYLNAVVGTALIKKYPKLESEFVYGDYKVYDVRKMIAKSEQEIGKATAKYFFYSNIMNFFKTEITLANGEIRKRPLIETNGETGEIVWDKGRDFATVRKVLSMPQVNIVKKTEVQTGGFSKESILPKRNSDKLIARKKDWDPKKYGGFDSPTVAYSVLVVAKVEKGKSKKLKSVKELLGITIMERSSFEKNPIDFLEAKGYKEVKKDLIIKLPKYSLFELENGRKRMLASAGELQKGNELALPSKYVNFLYLASHYEKLKGSPEDNEQKQLFVEQHKHYLDEIIEQISEFSKRVILADANLDKVLSAYNKHRDKPIREQAENIIHLFTLTNLGAPAAFKYFDTTIDRKRYTSTKEVLDATLIHQSITGLYETRIDLSQLGGD

SEQ ID NO: 65 - protein, 1368 aa, synthetic construct
MDKKYSIGLDIGTNSVGWAVITDEYKVPSKKFKVLGNTDRHSIKKNLIGALLFDSGETAEATRLKRTARRRYTRRKNRICYLQEIFSNEMAKVDDSFFHRLEESFLVEEDKKHERHPIFGNIVEEVAYHEKYPTIYHLRKKLADSDEKADLRLIYLALAHIIKFRGHFLIEGDLNSDNSDVQKLFKQLVQTYNQLFEESPLQEEGVDAKAILSEKLSKSRRLENLIAQFPGEKKNGLFGNLIALSLGLTPNFKSNFDLSEDAKLQLSKDTYDEDLENLLGQIGDQYADLFLAAKNLYDAILLSGILTVNDEITKAPLSASMVKRYDEHHQDLTLLKQLVREQLPEKYKEIFFDQSKNGYAGYIDGGASQEEFYKYIKKILEKIDGSEEFLDKINREDFLRKQRTFDNGSIPHQIHLQELHAILRRQEKYYPFLKENREKIEKILTFRIPYYVGPLARGNSRFAWMSRKSDETITPWNFEEVVDKEASAQAFIERMTNFDKNLPEEKVLPKHSLLYEKFTVYNELTKVKYVTEGMRKPEFLSAEQKQEIFDLLFKKNRKVTKKQLKEYLFKNFECFDIVEISGVEDRFNASLGTYHDLLKIIKDKDFLDNEENEEILEDIVLTLTLFEDREMIKERLEKYADLFDKKQLKKLKRRRYTGWGRLSKKLINGIRDKQSGKTILDFLISDGFANRNFMQLIHDDSLTFKEEIEKAQVSGKGDSLHEHIANLAGSPAIKKGILQTVKVVDELVKVMGRHKPENIVIEMARENQTTQKGQKNSRERMKRIEEGIKELGSQILKEHPVENTQLQNEKLYLYYLQNGRDMYVDQELDINRLSDYDVDHIVPQSFLKDDSIDNKVLTRSDKARGKSDNVPSEEVVKKMKNYWRQLLNAKLITQRKFDNLTKAERGGLSELDKAGFIKRQLVETRQITKHVAQILDSRMNTKYDENDKLIREVKVITLKSKLVSDFRKDFQFYKVREINNYHHAHDAYLNAVVGTALIKKYPKLESEFVYGDYKVYDVRKMIAKSEQEIGKATAKYFFYSNIMNFFKTEITLANGEIRKRPLIETNGETGEIVWDKGRDFATVRKVLSMPQVNIVKKTEVQTGGFSKESILPKRNSDKLIARKKDWDPKKYGGFDSPTVAYSVLVVAKVEKGKSKKLKSVKELLGITIMERSSFEKNPIDFLEAKGYKEVKKDLIIKLPKYSLFELENGRKRMLASAGELQKGNELALPSKYVNFLYLASHYEKLKGSPEDNEQKQLFVEQHKHYLDEIIEQISEFSKRVILADANLDKVLSAYNKHRDKPIREQAENIIHLFTLTNLGAPAAFKYFDTTIDRKRYTSTKEVLDATLIHQSITGLYETRIDLSQLGGD

SEQ ID NO: 66 - protein, 1368 aa, synthetic construct
MKKKYSIGLDIGTNSVGWAVITDEYKVPSKKFKVLGNTDRSSIKKNLIGALLFDSGETAEATRLKRTARRRYTRRKNRIRYLQEIFAEEMSKVDDSFFHRLEESFLVEEDKRDERHPIFGNIVDEVAYHEKYPTIYHLRKELVDSTEKADLRLIYLALAHMIKFRGHFLIEGDLNSENTDVQKLFIQLVQTYNQTFEENPLSEETVDAEAILTDKLSKSRRLENLIAQFPNEKRNGLFGNLIALSLGLTPNFKSNFNLAEDAKLQFSKDTYDEDLENLLAQIGDQYADLFLAAKNLYDAILLSGILRVNDESTKAPLSASMIKRYDEHHQDLTLLKQLVRQQLPEKYKEIFFDKSKNGYAGYIDGGASQEEFYKFIKPILEKMDGTEELLAKLNREDLLRKQRTFDNGSIPHQIHLGELHAILRRQEEYYPFLKENQEKIEKILTFRIPYYVGPLARGNSRFAWMTRKSDETITPWNFEEVVDKGASAEAFIERMTNFDKNLPEEKVLPKHSLLYEKFTVYNELTKVKYVTEGMGKPQFLDAEQKKEIVDLLFKKDRKVTVKQLKEFYFKEIDCFRIVDISGVEDRFNASLGTYHDLLKIIKDKAFLDNEENEKILEDIVLTLTLFEDREMIKKRLEKYANLFDKKVMKKLKRRRYTGWGRLSRKLINGIRDKQSGKTILDFLISDGFANRNFMQLIHDDSLTFKEEIKKAQVEGQGESLHEQIADLAGSPAIKKGILQTVKVVDELVKVMGRHKPENIVIEMARENQTTQKGQKNSRERLKRIEEGIKELGSQILKEHPVENTQLQNEKLYLYYLQNGRDMYTGEELDIDRLSDYDVDHIVPQSFIKDDSIDNKVLTRSKEARGKSDDVPSEEVVRKMKSYWRQLLKAKLITQRKFDNLTKAERGGLTELDKAGFIKRQLVETRQITKHVAQILDSRMNTERDENDKLIRDVKVITLKSKLVSDFRKDFEFYKVREINDYHHAHDAYLNAVVGTALIKKYPKLESEFVYGDYPVYNSYKMIAKSEQEIGKATAKYFFYSNIMNFFKTEITLANGEIRKRPLIETNGETGEIVWDKGRDFATVRKVLSMPQVNIVKKTEVQTGGFSKESILPKRNSDKLIARKKDWDPKKYGGFDSPTVAYSVLVVAKVEKGKSKKLKSVKELLGITIMERSSFEKNPIDFLEAKGYKEVKKDLIIKLPKYSLFELENGRKRMLASAGELQKGNELALPSKYVNFLYLASHYEKLKGSPEDNEQKQLFVEQHKHYLDEIIEQISEFSKRVILADANLDKVLSAYNKHRDKPIREQAENIIHLFTLTNLGAPAAFKYFDTTIDRKRYTSTKEVLDATLIHQSITGLYETRIDLSQLGGD

SEQ ID NO: 67 - protein, 1368 aa, synthetic construct
MKKKYSIGLDIGTNSVGWAVITDEYKVPSKKFKVLGNTDRHSIKKNLIGALLFDSGETAEATRLKRTARRRYTRRKNRIRYLQEIFSEEMAKVDDSFFHRLEESFLVEEDKKHERHPIFGNIVDEVAYHEKYPTIYHLRKKLADSTEKADLRLIYLALAHMIKFRGHFLIEGDLNSDNSDVDKLFIQLVQTYNQLFEENPINEEGVDAKAILSAKLSKSRRLENLIAQLPGEKKNGLFGNLIALSLGLTPNFKSNFDLAEDAKLQLSKDTYDDDLDNLLAQIGDQYADLFLAAKNLSDAILLSDILTVNSEITKAPLSASMIKRYDEHHQDLTLLKALVRQQLPEKYKEIFFDQSKNGYAGYIDGGASQEEFYKYIKPILEKMDGTEELLAKLNREDFLRKQRTFDNGSIPHQIHLGELHAILRRQEDFYPFLKENREKIEKILTFRIPYYVGPLARGNSRFAWMTRKSEETITPWNFEEVVDKGASAQSFIERMTNFDKNLPNEKVLPKHSLLYEYFTVYNELTKVKYVTEGMRKPEFLSGEQKKAIVDLLFKKNRKVTVKQLKEDYFKKIECFDSVEISGVEDRFNASLGTYHDLLKIIKDKDFLDNEENEDILEDIVLTLTLFEDKEMIEERLKKYANLFDDKVLKQLKRRRYTGWGRLSRKLINGIRDKQSGKTILDFLKSDGFANRNFMQLIHDDSLTFKEEIQKAQVSGQGDSLHEQIANLAGSPAIKKGILQTVKIVDELVKVMGRHKPENIVIEMARENQTTQKGQKNSRERMKRIEEGIKELGSQILKEHPVENTQLQNEKLYLYYLQNGKDMYTGQELDIDRLSDYDVDHIIPQSFIKDDSIDNKVLTSSDKARGKSDNVPSEEVVKKMKNYWRQLLNAKLISQRKFDNLTKAERGGLSELDKAGFIKRQLVETRQITKHVAQILDSRFNTEYDENDKLIRDVKIITLKSKLVSDFRKDFQFYKVREINNYHHAHDAYLNAVVGTALIKKYPKLESEFVYGDYKVYDVRKMIAKSEQEIGKATAKRFFYSNIMNFFKTEITLANGEIRKRPLIETNEETGEIVWDKGKDFATVRKVLSMPQVNIVKKTEVQTGGFSKESILPKRNSDKLIARKKDWDTKKYGGFDSPTVAYSVLVVAKVEKGKTKKLKTVKELVGITIMERSSFEKDPVDFLEAKGYKEIQKDLIIKLPKYSLFELENGRKRMLASAGELQKGNELALPSKYVTFLYLASHYEKLKGSPEDEEQKQLYVEQHRHYFDEIVEQISEFSERYILADKNLEKILSLYNEFEDKPIEEQAENFINLFTLTALGAPAAFKFFDTTIDRKRYTSTKEILDATLIHQSITGLYETRIDLSQLGGD

SEQ ID NO: 68 - protein, 1368 aa, synthetic construct
MDKKYSIGLDIGTNSVGWAVITDEYKVPSKKFKVLGNTDRHSIKKNLIGALLFDSGETAEATRLKRTARRRYTRRKNRICYLQEIFSNEMAKVDDSFFHRLEESFLVEEDKKHERHPIFGNIVDEVAYHEKYPTIYHLRKELADSTEKADLRLIYLALAHMIKFRGHFLIEGDLNSENSDVQKLFIQLVQTYNQLFEENPINEEGVDAKAILTAKLSKSRRLENLIAQFPGEKKNGLFGNLIALSLGLTPNFKSNFVLSEDAKLQLSKDTYDEDLENLLGQIGDQYADLFLAAKNLSDAILLSDILTVNSEITKAPLSASMIKRYDEHHQDLTLLKNLVRQQLPEKYKEIFFDKSKNGYAGYIDGGASQEEFYKYIKPILEKMDGTEEFLAKIEREDFLRKQRTFDNGSIPHQIHLKELHAILRRQEEYYPFLKENREKIEKILTFRIPYYVGPLARGNSRFAWMTRKSDETITPWNFEEVVDKEASAQAFIERMTNFDKNLPNEKVLPKHSLLYEYFTVYNELTKVKYVTEGMGKPQFLSAEQKQEIVDLLFKKERKVTKKQLKDFLFKEIEEFDSVEISGVEDAFNASLGTYHDLLKIIKDKDFLDNEENEDILEDIILTLTLFEDREMIEKRLKKYANLFDKKVLKQLKRRRYTGWGRLSKKLINGIRDKQSGKTILDFLKSDGFANRNFMQLIHDDSLTFKEEIQKAQVSGQGDSLHEHIANLAGSPAIKKGILQTVKVVDELVKVMGRHKPENIVIEMARENQTTQKGQKNSRERMKRIEEGIKELGSQILKEHPVENTQLQNEKLYLYYLQNGRDMYVDQELDINRLSDYDVDHIVPQSFLKDDSIDNKVLTRSDKARGKSDNVPSEEVVKKMKNYWRQLLNAKLITQRKFDNLTKAERGGLSELDKAGFIKRQLVETRQITKHVAQILDSRMNTKYDENDKLIREVKVITLKSKLVSDFRKDFQFYKVREINNYHHAHDAYLNAVVGTALIKKYPKLESEFVYGDYKVYDVRKMIAKSEQEIGKATAKYFFYSNIMNFFKTEITLANGEIRKRPLIETNGETGEIVWDKGRDFATVRKVLSMPQVNIVKKTEVQTGGFSKESILPKRNSDKLIARKKDWDPKKYGGFDSPTVAYSVLVVAKVEKGKSKKLKSVKELLGITIMERSSFEKNPIDFLEAKGYKEVKKDLIIKLPKYSLFELENGRKRMLASAGELQKGNELALPSKYVNFLYLASHYEKLKGSPEDNEQKQLFVEQHKHYLDEIIEQISEFSKRVILADANLDKVLSAYNKHRDKPIREQAENIIHLFTLTNLGAPAAFKYFDTTIDRKRYTSTKEVLDATLIHQSITGLYETRIDLSQLGGD

SEQ ID NO: 69 - protein, 1368 aa, synthetic construct
MDKKYSIGLDIGTNSVGWAVITDEYKVPSKKFKVLGNTDRHSIKKNLIGALLFDSGETAEATRLKRTARRRYTRRKNRICYLQEIFSNEMAKVDDSFFHRLEESFLVEEDKRGERHPIFGNIADEKAYHEKYPTIYHLRKKLADSTEKADLRLIYLALAHMIKFRGHFLIEGDLNSDNSDVQKLFDELVQTYNQLFEESPLNEETVDAEAILTEKLSKSRRLENLIAQFPGEKKNGLFGNLIALSLGLTPNFKSNFDLSEDAKLQFSKDTYDEDLEELLGQIGDEYADLFLAAKNLYDAILLSGILTVNDESTKAPLSASMVKRYEEHQQDLKLLKKFIRQQLPEKYKEIFSDKSKNGYAGYIDGKTSQEEFYKYLKKILEKLDGSEEFLDKIEREDFLRKQRTFDNGSIPHQIHLNELHAILRRQEEYYPFLKENQEKIEKILTFRIPYYVGPLARGNSRFAWMERKSDEKITPWNFDEVVDKEASAEKFIERMTNNDLYLPEEKVLPKHSLLYEKFTVYNELTKVKYVTEGMRKPEFLSAEQKQEIFDLLFKKNRKVTKKKLKEYLFKKFECFDIVEITGLDDRFNASLGTYHDLLKIIKDKDFLDNDENEEILEDIVLTLTLFEDREMIKKRLEKYADLFDKKQLKKLKRRHYTGWGRLSKKLINGIRDKQSGKTILDYLIDDGFANRNFMQLIHDDSLTFKEEIQKAQVIGDGDSLHEHIANLAGSPAIKKGILQTVKVVDELVKVMGRHKPENIVIEMARENQTTQKGQRNSRQRLKRIEEAIKELGSKILKEHPVENQQLQNDRLYLYYLQNGRDMYTGEELDIDRLSQYDIDHIIPQSFIKDDSIDNRVLVSSAKARGKSDNVPSEEVVKKMKSYWKKLLDAKLISQRKFDNLTKAERGGLSELDKAGFIKRQLVETRQITKHVAQILDSRMNTKYDENDKLIREVKVITLKSKLVSDFRKDFQFYKVREINNYHHAHDAYLNAVVGTALIKKYPKLESEFVYGDYKVYDVRKMIAKSEQEIGKATAKYFFYSNIMNFFKTEITLANGEIRKRPLIETNGETGEIVWDKGRDFATVRKVLSMPQVNIVKKTEVQTGGFSKESILPKRNSDKLIARKKDWDPKKYGGFDSPTVAYSVLVVAKVEKGKSKKLKSVKELLGITIMERSSFEKNPIDFLEAKGYKEVKKDLIIKLPKYSLFELENGRKRMLASAGELQKGNELALPSKYVNFLYLASHYEKLKGSPEDNEQKQLFVEQHKHYLDEIIEQISEFSKRVILADANLDKVLSAYNKHRDKPIREQAENIIHLFTLTNLGAPAAFKYFDTTIDRKRYTSTKEVLDATLIHQSITGLYETRIDLSQLGGD

SEQ ID NO: 70 - protein, 1368 aa, synthetic construct
MDKKYSIGLDIGTNSVGWAVITDEYKVPSKKFKVLGNTDRHSIKKNLIGALLFDSGETAEATRLKRTARRRYTRRKNRICYLQEIFSNEMAKVDDSFFHRLEESFLVEEDKKHERHPIFGNIVDEVAYHEKYPTIYHLRKKLVDSTDKADLRLIYLALAHMIKFRGHFLIEGDLNPDNSDVQKLFIQLVQTYNQLFEESPLNEEGVDAKAILSARLSKSRRLENLISQFPGEKKNGLFGNLIALSLGLTPNFKSNFDLAEDAKLQLSKDTYDEDLENLLGQIGDQYADLFLAAKKLSDAILLSGILTVNTEITKAPLSASMIKRYDEHHQDLTLLKALVRQQLPEKYKEIFFDQSKNGYAGYIDGGASQEEFYKFIKPILEKMDGTEELLVKLNREDLLRKQRTFDNGSIPHQIHLGELHAILRRQEDFYPFLKDNREKIEKILTFRIPYYVGPLARGNSRFAWMTRKSEETITPWNFEEVVDKGASAQSFIERMTNFDKNLPNEKVLPKHSLLYEYFTVYNELTKVKYVTEGMRKPAFLSGEQKKAIVDLLFKTNRKVTVKQLKEDYFKKIECFDSVEISGVEDRFNASLGTYHDLLKIIKDKDFLDNEENEDILEDIVLTLTLFEDREMIEERLKTYAHLFDDKVMKQLKRRRYTGWGRLSRKLINGIRDKQSGKTILDFLKSDGFANRNFMQLIHDDSLTFKEDIQKAQVSGQGDSLHEHIANLAGSPAIKKGILQTVKVVDELVKVMGRHKPENIVIEMARENQTTQKGQKNSRERMKRIEEGIKELGSQILKEHPVENTQLQNEKLYLYYLQNGRDMYVDQELDINRLSDYDVDHIVPQSFLKDDSIDNKVLTRSDKARGKSDNVPSEEVVKKMKNYWRQLLNAKLITQRKFDNLTKAERGGLSELDKAGFIKRQLVETRQITKHVAQILDSRMNTKYDENDKLIREVKVITLKSKLVSDFRKDFQFYKVREINNYHHAHDAYLNAVVGTALIKKYPKLESEFVYGDYKVYDVRKMIAKSEQEIGKATAKYFFYSNIMNFFKTEITLANGEIRKRPLIETNGETGEIVWDKGRDFATVRKVLSMPQVNIVKKTEVQTGGFSKESILPKRDSDKLIARKKDWDTKKYGGFDSPTVAYSVLVIAKVEKGKAKKLKTVKELVGITIMERSAFEKNPVAFLEDKGYKNIQKDLIIKLPKYSLFELENGRKRLLASAGELQKGNELALPNKYVTLLYHASNYEKLKGSPEDNEQKRLYVEQHKDYFDEILDQIIEFSKRYILADANLEKIKSLYEKNFDSSIEELATSFINLLTFTALGAPAAFKFFGTDIDRKRYTSTKEILNATLIHQSITGLYETRIDLSQLGGD

SEQ ID NO: 71 - protein, 1368 aa, synthetic construct
MKKKYSIGLDIGTNSVGWAVVTDEYKVPSKKFKVLGNTDRTSIKKNLLGALLFDSGETAEATRLKRTARRRYTRRKNRIRYLQEIFSNEMSKVDDSFFHRLEESFLVEEDKKHERHPIFGNIVDEVAYHEKYPTIYHLRKHLADSTEKADLRLIYLALAHIIKFRGHFLIEGDLNIDNSDVQKLFIQLVQTYNNLFEENHLNESGVDAKAILTAALSKSRRLENLIAQFPGEKKNGLFGNLIALSLGLTPNFKSNFDLEEDAKLQLSKDTYDEDLDNLLAQIGDQYADLFLAAKNLSDAILLSGILTVNDEVTKAPLSASMIKRYDEHHQDLTLLKNFVRQQLPEKYKEIFFDESKNGYAGYIDGGASQEEFYKYIKPILEKMDGAEEFLAKINREDFLRKQRTFDNGSIPHQIHLGELHAILRRQEDFYPFLKDNREKIEKILTFRIPYYVGPLARGNSRFAWMTRKSDETITPWNFEEVVDKEASAQAFIERMTNFDKNLPNEKVLPKHSLLYEYFTVYNELTKVKYVTEGMGKPEFLSSEQKEEIVDLLFKTNRKVTVKQLKEDYFKKIECFDSVEISGVEDRFNASLGTYHDLLKIIKDKDFLDNEENEDILEDIVLTLTLFEDREMIEERLEKYANLFDDKVLKKLKRRRYTGWGRLSKKLINGIRDKQSGKTILDFLKDDGFANRNFMQLIHDDSLTFKEAIQKAQVIGQGDSLHEQIANLAGSPAIKKGILQTVKIVDELVKVMGRHKPENIVIEMARENQTTQKGQKNSRERMKRIEEGIKELGSQILKEHPVENTQLQNEKLYLYYLQNGRDMYVDQELDINRLSDYDVDHIVPQSFLKDDSIDNKVLTRSDKARGKSDNVPSEEVVKKMKNYWRQLLNAKLITQRKFDNLTKAERGGLSELDKAGFIKRQLVETRQITKHVAQILDSRFNTERDENDKLIREVKIITLKSKLVSDFRKDFEFYKVREINDYHHAHDAYLNAVVGTALIKKYPKLESEFVYGDYKVYDVRKMIAKSEQEIGKATAKYFFYSNIMNFFKTEITLANGEIRKRPLIETNEETGEIVWDKGKDFATVRKVLSMPQVNIVKKTEVQTGGFSKESILPKRNSDKLIARKKDWDTKKYGGFDSPTVAYSVLVVAKVEKGKSKKLKTVKELVGITIMERSSFEKDPIAFLEDKGYKEVQKDLIIKLPKYSLFELENGRKRLLASAGELQKGNELALPSHYVRFLYLAKNYEKLKGKEEDDEKKRYYVEQHRDEFDEILEQISEFSERYILADKNLEKILELYNENEDKDINELAENFIHLFTFTSLGAPAAFKFFDTTIDRKRYTSTKEILDATLIHQSITGLYETRIDLSQLGGD

SEQ ID NO: 72 - protein, 1368 aa, synthetic construct
MDKKYSIGLDIGTNSVGWAVITDEYKVPSKKFKVLGNTDRQSIKKNLLGALLFDSGETAEATRLKRTARRRYTRRKNRIRYLQEIFAEEMAKVDDSFFHRLEESFLVEEDKKHERHPIFGNIVDEVAYHEKYPTIYHLRKKLADSTEKADLRLIYLALAHMIKFRGHFLIEGDLNSDNSDVDKLFIQLVQTYNQLFEENPINESGVDAKAILSAKLSKSRRLENLIAQLPGEKKNGLFGNLIALSLGLTPNFKSNFDLAEDAKLQLSKDTYDDDLENLLGQIGDQYADLFLAAKNLSDAILLSDILTVNDEITKAPLSASMIKRYDEHHQDLTLLKALVRQQLPEKYKEIFFDKSKNGYAGYIDGGASQEEFYKFIKPILEKMDGTEELLAKLNREDFLRKQRTFDNGSIPHQIHLGELHAILRRQEEFYPFLKENREKIEKILTFRIPYYVGPLARGNSRFAWMTRKSEETITPWNFEEVVDKGASAQAFIERMTNFDKNLPTEKVLPKHSLLYEYFTVYNELTKVKYVTEGMRKPEFLSGNQKQEIVDLLFKKNRKVTVKQLKEDYFKKIECFDSVEISGVEDRFNASLGTYHDLLKIIKDKDFLDNEENEDILEDIVLTLTLFEDKEMIEERLKKYANLFDDKVLKQLKRRRYTGWGRLSRKLINGIRDKQSGKTILDFLKSDGFANRNFMQLIHDDSLTFKEDIKKAQVSGQGDSLHEQIANLAGSPAIKKGILQTVKIVDELVKVMGRHKPENIVIEMARENQTTQKGQKNSRERMKRLEEGIKELGSQILKEHPVENTQLQNEKLYLYYLQNGKDMYTGQELDIDRLSDYDVDHIIPQSFIKDDSIDNKVLTSSDKARGKSDDVPSEEVVKKMKNYWRQLLKAKLISQRKFDNLTKAERGGLSELDKAGFIKRQLVETRQITKHVAQILDSRFNTEHDENDKLIRDVKIITLKSKLVSDFRKDFQFYKVREINDYHHAHDAYLNAVVGTALIKKYPKLESEFVYGDYKVYDVRKMIAKSEQEIGKATAKRFFYSNIMNFFKTEITLANGEIRKRPLIETNEETGEIVWDKEKDFATVRKVLSMPQVNIVKKTEVQTGGFSKESILPKRNSDKLIARKKDWDPKKYGGFDSPTVAYSVLVVAKVEKGKSKKLKSVKELVGITIMERSSFEKDPVDFLEAKGYKEVQKDLIIKLPKYSLFELENGRKRMLASAGELQKGNELALPSKYVTFLYLASHYEKLKGSPEDNEQKQLFVEQHKDYFDEILEQISEFSKRYILADKNLEKILSLYNENEDKSIEEQAENFINLFTLTNLGAPAAFKFFGTTIDRKRYTSTKEILDSTLIHQSITGLYETRIDLSQLGGD

SEQ ID NO: 73 - protein, 1368 aa, synthetic construct
MDKKYSIGLDIGTNSVGWAVITDEYKVPSKKFKVLGNTDRHSIKKNLIGALLFDSGETAEATRLKRTARRRYTRRKNRIRYLQEIFSNEMAKVDDSFFHRLEESFLVEEDKKHERHPIFGNIVDEVAYHEKYPTIYHLRKKLADSDEKADLRLIYLALAHMIKFRGHFLIEGDLNSDNSDVQKLFIQLVQTYNQLFEENPINESGVDAKAILSARLSKSRRLENLIAQFPGEKKNGLFGNLIALSLGLTPNFKSNFDLAEDAKLQLSKDTYDEDLENLLAQIGDQYADLFLAAKNLSDAILLSDILTVNDEITKAPLSASMVKRYDEHHQDLTLLKALVRQQLPEKYKEIFFDQSKNGYAGYIDGGASQEEFYKYIKPILEKMDGSEEFLAKINREDFLRKQRTFDNGSIPHQIHLGELHAILRRQEKYYPFLKDNREKIEKILTFRIPYYVGPLARGNSRFAWMTRKSEETITPWNFEEVVDKEASAQKFIERMTNFDKNLPNEKVLPKHSLLYEYFTVYNELTKVKYVTEGMRKPEFLSGEQKQEIVDLLFKKNRKVTVKQLKEDYFKKIECFDSVEISGVEDRFNASLGTYHDLLKIIKDKDFLDNEENEDILEDIVLTLTLFEDREMIEERLKKYANLFDDKVLKQLKRRRYTGWGRLSRKLINGIRDKQSGKTILDFLKSDGFANRNFMQLIHDDSLTFKEEIEKAQVSGQGDSLHEQIANLAGSPAIKKGILQTIKIVDELVKVMGRHKPENIVIEMARENQTTQKGQKNSRERMKRIEEGIKELGSQILKEHPVENTQLQNEKLYLYYLQNGRDMYVDQELDINRLSDYDVDHIVPQSFLKDDSIDNKVLTRSDKARGKSDNVPSEEVVKKMKNYWRQLLNAKLITQRKFDNLTKAERGGLSELDKAGFIKRQLVETRQITKHVAQILDSRFNTKYDENDKLIRDVKIITLKSKLVSDFRKDFQFYKVREINNYHHAHDAYLNAVVGTALIKKYPKLESEFVYGDYKVYDVRKMIAKSEQEIGKATAKYFFYSNIMNFFKTEITLANGEIRKRPLIETNEETGEIVWDKEKDFATVRKVLSMPQVNIVKKTEVQTGGFSKESILPKRNSDKLIARKKDWDPKKYGGFDSPTVAYSVLVIAKVEKGKAKKLKSVKELVGITIMERSSFEKNPIDFLEAKGYKEIKKDLIIKLPKYSLFELENGRKRMLASAGELQKGNELALPSKYVTFLYLASHYEKLKGSEEDNEQKQLFVEQHKHYFDEIIEQISEFSKRYILADANLEKILSLYNKNRDKSIEEQAENFIHLFTFTNLGAPAAFKFFDTTIDRKRYTSTKEILDATLIHQSITGLYETRIDLSQLGGD

SEQ ID NO: 74 - protein, 1368 aa, synthetic construct
MDKKYSIGLDIGTNSVGWAVITDEYKVPSKKFKVLGNTDRHSIKKNLIGALLFDSGETAEATRLKRTARRRYTRRKNRICYLQEIFSNEMAKVDDSFFHRLEESFLVEEDKRNERHPIFGNIVDEVAYHEKYPTIYHLRKKLADSDEKADLRLIYLALAHMIKFRGHFLIEGDLNSENSDVQKLFIQLVQTYNQTFEESPLNEETVDAKAILTARLSKSRRLENLIAQFPGEKKNGLFGNLIALSLGLTPNFKSNFDLAEDAKLQFSKDTYDEDLENLLGQIGDEYADLFLAAKNLYDAILLSGILTVNDEITKAPLSASMVKRYDEHQQDLKLLKKLVREQLPEKYKEIFSDKSKNGYAGYIDGGTSQEEFYKYIKPILEKMDGSEEFLEKINREDFLRKQRTFDNGSIPHQIHLGELHAILRRQEKYYPFLKENREKIEKILTFRIPYYVGPLARGNSRFAWMTRKSDEKITPWNFEEVVDKEASAQKFIERMTNNDTYLPDEKVLPKHSLLYEKFTVYNELTKVKYVTEGMRKPEFLSAEQKQEIVDLLFKKNRKVTVKKLKEYLFKKIECFDSVEISGLEDRFNASLGTYHDLLKIIKDKDFLDNEENEDILEDIVLTLTLFEDREMIEERLKKYADLFDKKVLKKLKRRHYTGWGRLSKKLINGIRDKQSGKTILDFLIDDGFANRNFMQLIHDDSLTFKEEIKKAQVIGQGDSLHEHIANLAGSPAIKKGILQTVKVVDELVKVMGRHKPENIVIEMARENQTTQKGQRNSRQRLKRLEEAIKELGSNILKEHPVENSQLQNDRLYLYYLQNGKDMYTGEELDIDRLSDYDIDHIIPQSFIKDDSIDNRVLVSSAKARGKSDNVPSEEVVKKMKNYWRQLLEAKLISQRKFDNLTKAERGGLSELDKAGFIKRQLVETRQITKHVAQILDSRMNTKYDENDKLIREVKVITLKSKLVSDFRKDFQFYKVREINNYHHAHDAYLNAVVGTALIKKYPKLESEFVYGDYKVYDVRKMIAKSEQEIGKATAKYFFYSNIMNFFKTEITLANGEIRKRPLIETNGETGEIVWDKGRDFATVRKVLSMPQVNIVKKTEVQTGGFSKESILPKRNSDKLIARKKDWDPKKYGGFDSPTVAYSVLVVAKVEKGKSKKLKSVKELLGITIMERSSFEKNPIDFLEAKGYKEVKKDLIIKLPKYSLFELENGRKRMLASAGELQKGNELALPSKYVNFLYLASHYEKLKGSPEDNEQKQLFVEQHKHYLDEIIEQISEFSKRVILADANLDKVLSAYNKHRDKPIREQAENIIHLFTLTNLGAPAAFKYFDTTIDRKRYTSTKEVLDATLIHQSITGLYETRIDLSQLGGD

SEQ ID NO: 75 - protein, 1368 aa, synthetic construct
MDKKYSIGLDIGTNSVGWAVITDEYKVPSKKFKVLGNTDRHSIKKNLIGALLFDSGETAEATRLKRTARRRYTRRKNRIRYLQEIFANEMAKVDDSFFHRLEESFLVEEDKKNERHPIFGNIVDEVAYHEKYPTIYHLRKKLVDSDEKADLRLIYLALAHMIKFRGHFLIEGDLNSDNSDVDKLFIQLVQTYNQLFEENPIEAEGVDAKAILSERLSKSRRLENLIAQLPGEKKNGLFGNLIALSLGLTPNFKSNFDLAEDAKLQLSKDTYDDDLENLLGQIGDQYADLFLAAKNLSDAILLSDILRVNTEITKAPLSASMIKRYDEHHQDLTLLKALVRQQLPEKYKEIFFDQSKNGYAGYIDGGASQEEFYKYIKPILEKMDGTEELLAKLDREDLLRKQRTFDNGSIPHQIHLGELHAILRRQEKYYPFLKENREKIEKILTFRIPYYVGPLARGNSRFAWMTRKSDETITPWNFEEVVDKGASAEAFIERMTNFDKNLPNEKVLPKHSLLYEYFTVYNELTKVKYVTEGMRKPEFLDGEQKKEIVDLLFKKNRKVTVKQLKEDYFKEFECFDSVEISGVEDRFNASLGTYHDLLKIIKDKDFLDNEENEDILEDIVLTLTLFEDREMIKERLKKYANLFDDKVMKQLKRRRYTGWGRLSRKLINGIRDKQSGKTILDFLKSDGFANRNFMQLIHDDSLTFKDEIEKAQVSGQGESLHEHIANLAGSPAIKKGILQTVKVVDELVKVMGRHKPENIVIEMARENQTTQKGQKNSRERMKRIEEGIKELGSQILKEHPVENTQLQNEKLYLYYLQNGRDMYVDQELDINRLSDYDVDHIVPQSFLKDDSIDNKVLTRSDKARGKSDNVPSEEVVKKMKNYWRQLLNAKLITQRKFDNLTKAERGGLSELDKAGFIKRQLVETRQITKHVAQILDSRMNTKYDDNDKLIRDVKVITLKSKLVSDFRKDFQFYKVREINNYHHAHDAYLNAVVGTALIKKYPKLESEFVYGDYKVYDVRKMIAKSEQEIGKATAKYFFYSNIMNFFKTEITLANGEIRKRPLIEVNEETGEIVWDKEKDFATVRKVLSMPQVNIVKKTEVQTGGFSKESILPKRNSDKLIARKKDWDPKKYGGFDSPTVAYSVLVVAKVEKGKAKKLKTVKELLGITIMERSAFEKDPVAFLEAKGYKEVKKDLIIKLPKYSLFELENGRKRMLASAGELQKGNELALPSKYVNFLYLASHYEKLKGSEEDNKQKQLFVEQHKEYLDEIIDQISEFSKRVILADANLEKVKSAYEKHRDKSIEEQAENIIHLFTLTNLGAPAAFKYFDTTIDRKRYTSTKEVLNATLIHQSITGLYETRIDLSQLGGD

SEQ ID NO: 76 - protein, 1368 aa, synthetic construct
MDKKYSIGLDIGTNSVGWAVITDEYKVPSKKFKVLGNTDRHSIKKNLIGALLFDSGETAEATRLKRTARRRYTRRKNRIRYLQEIFSEEMAKVDDSFFHRLEESFLVEEDKRHERHPIFGNIVDEVAYHEKYPTIYHLRKKLADSDEKADLRLIYLALAHMIKFRGHFLIEGDLNSDNSDVQKLFIQLVQTYNQLFEENPINEEGVDAKAILTARLSKSRRLENLIAQFPGEKKNGLFGNLIALSLGLTPNFKSNFDLAEDAKLQLSKDTYDDDLENLLAQIGDQYADLFLAAKNLSDAILLSGILTVNDEITKAPLSASMVKRYDEHHQDLTLLKALVRQQLPEKYKEIFFDQSKNGYAGYIDGGASQEEFYKYLKPILEKLDGSEEFLDKIEREDFLRKQRTFDNGSIPHQIHLGELHAILRRQEKYYPFLKENREKIEKILTFRIPYYVGPLARGNSRFAWMTRKSEETITPWNFEEVVDKEASAQAFIERMTNFDKNLPEEKVLPKHSLLYEKFTVYNELTKVKYVTEGMRKPEFLSAEQKQEIVDLLFKKNRKVTVKQLKEYYFKKIECFDSVEISGVEDRFNASLGTYHDLLKIIKDKDFLDNEENEDILEDIVLTLTLFEDREMIEKRLKKYAHLFDDKVLKKLKRRRYTGWGRLSKKLINGIRDKQSGKTILDFLISDGFANRNFMQLIHDDSLTFKEEIEKAQVIGQGDSLHELIANLAGSPAIKKGILQTIKIVDELVKVMGRHEPENIVIEMARENQTTQKGQKNSRERMKRLEEGIKELGSDILKEHPVENTQLQNEKLYLYYLQNGKDMYTGEELDIDRLSDYDVDHIVPQSFLKDDSIDNKVLVSSEKARGKSDNVPSEEVVKKMKNYWKQLLEAKLITQRKFDNLTKAERGGLTELDKAGFIKRQLVETRQITKHVAQILDSRFNTKYDENDKLIRDVKIITLKSKLVSDFRKDFQFYKVREINNYHHAHDAYLNAVVGTALIKKYPKLESEFVYGDYKVYDVRKMIAKSEQEIGKATAKYFFYSNIMNFFKSEITLANGEIRKRPLIETNEETGEIVWDKGKDFATVRKVLSMPQVNIVKKTEVQTGGFSKESILPKRNSDKLIARKKDWDPKKYGGFDSPTVAYSVLVVAKVEKGKAKKLKTVKELVGITIMERSSFEKNPIAFLEAKGYKNVQKDLIIKLPKYSLFELENGRKRMLASAGELQKGNELALPNKYVTLLYLASHYEKLKGSPEDNEQKQLFVEQHKEYFDEIIEQISEFSKRYILADANLEKIKSLYEKNRDKSIEEQAENFINLLTFTALGAPAAFKFFDTTIDRKRYTSTKEILNATLIHQSITGLYETRIDLSQLGGD

SEQ ID NO: 77 - protein, 1368 aa, synthetic construct
MDKKYSIGLDIGTNSVGWAVITDEYKVPSKKFKVLGNTDRHSIKKNLIGALLFDSGETAEATRLKRTARRRYTRRKNRICYLQEIFSNEMAKVDDSFFHRLEESFLVEEDKKNERHPIFGNIVDEVAYHEKYPTIYHLRKKLADSDEKADLRLIYLALAHMIKFRGHFLIEGDLNSDNSDVDKLFIQLVQTYNQLFEENPINEEGVDAKAILSARLSKSRRLENLIAQFPGEKKNGLFGNLIALSLGLTPNFKSNFDLAEDAKLQLSKDTYDEDLENLLGQIGDQYADLFLAAKNLSDAILLSDILTVNDEITKAPLSASMVKRYDEHHQDLTLLKALVRQQLPEKYKEIFFDQSKNGYAGYIDGGASQEEFYKYIKPILEKMDGSEEFLDKLEREDFLRKQRTFDNGSIPHQIHLGELHAILRRQEKYYPFLKDNREKIEKILTFRIPYYVGPLARGNSRFAWMTRKSDETITPWNFEEVVDKEASAQKFIERMTNFDKNLPNEKVLPKHSLLYEYFTVYNELTKVKYVTEGMRKPEFLSGEQKQEIVDLLFKKNRKVTVKQLKEDYFKKFECFDSVEISGVEDRFNASLGTYHDLLKIIKDKDFLDNEENEDILEDIVLTLTLFEDREMIEERLKKYADLFDKKVLKQLKRRRYTGWGRLSKKLINGIRDKQSGKTILDFLKSDGFANRNFMQLIHDDSLTFKEEIQKAQVSGKGDSLHEHIANLAGSPAIKKGILQTVKVVDELVKVMGRHKPENIVIEMARENQTTQKGQKNSRERMKRIEEGIKELGSQILKEHPVENTQLQNEKLYLYYLQNGRDMYVDQELDINRLSDYDVDHIVPQSFLKDDSIDNKVLTRSDKARGKSDNVPSEEVVKKMKNYWRQLLNAKLITQRKFDNLTKAERGGLSELDKAGFIKRQLVETRQITKHVAQILDSRMNTKYDENDKLIREVKVITLKSKLVSDFRKDFQFYKVREINNYHHAHDAYLNAVVGTALIKKYPKLESEFVYGDYKVYDVRKMIAKSEQEIGKATAKYFFYSNIMNFFKTEITLANGEIRKRPLIETNGETGEIVWDKGRDFATVRKVLSMPQVNIVKKTEVQTGGFSKESILPKRNSDKLIARKKDWDTKKYGGFDSPTVAYSVLVIAKVEKGKAKKLKTVKELVGITIMERSSFEKNPIDFLEAKGYKEIKKDLIIKLPKYSLFELENGRKRLLASAGELQKGNELALPNKYVTFLYLASHYEKLKGSPEDNEQKQLFVEQHKHYFDEIIEQISEFSKRVILADANLEKILSLYNKNRDKSIEEQAENIIHLFTFTNLGAPAAFKFFDTTIDRKRYTSTKEILDATLIHQSITGLYETRIDLSQLGGD

SEQ ID NO: 78 - protein, 1368 aa, synthetic construct
MKKKYSIGLDIGTNSVGWAVITDEYKVPSKKFKVLGNTDRQSIKKNLIGALLFDSGETAEATRLKRTARRRYTRRKNRIRYLQEIFAEEMAKVDDSFFHRLEESFLVEEDKKHERHPIFGNIVDEVAYHEKYPTIYHLRKKLVDSTEKADLRLIYLALAHMIKFRGHFLIEGDLNSENSDVQKLFIQLVQTYNQLFEENPLNESGVDAKAILSAKLSKSRRLENLIAQLPGEKKNGLFGNLIALSLGLTPNFKSNFDLSEDAKLQLSKDTYDDDLDNLLGQIGDQYADLFLAAKNLSDAILLSDILRVNTEITKAPLSASMIKRYDEHHQDLTLLKALVRQQLPEKYKEIFFDESKNGYAGYIDGGASQEEFYKFIKPILEKMDGTEELLAKLNREDLLRKQRTFDNGSIPHQIHLGELHAILRRQEEFYPFLKENREKIEKILTFRIPYYVGPLARGNSRFAWMTRKSEETITPWNFEEVVDKGASAQSFIERMTNFDKNLPNEKVLPKHSLLYEYFTVYNELTKVKYVTEGMGKPEFLSGEQKKEIVDLLFKKNRKVTVKQLKEFYFKEIECFDSVEISGVEDRFNASLGTYHDLLKIIKDKDFLDNEENEDILEDIVLTLTLFEDREMIEERLKKYANLFDDKVMKQLKRRRYTGWGRLSRKLINGIRDKQSGKTILDFLKSDGFANRNFMQLIHDDSLTFKEEIKKAQVKGQGDSLHEQIANLAGSPAIKKGILQTVKVVDELVKVMGRHKPENIVIEMARENQTTQKGQKNSRERMKRIEEGIKELGSQILKEHPVENTQLQNEKLYLYYLQNGRDMYTGQELDINRLSDYDVDHIVPQSFLKDDSIDNKVLTRSEKARGKSDNVPSEEVVKKMKSYWRQLLKAKLITQRKFDNLTKAERGGLSELDKAGFIKRQLVETRQITKHVAQILDSRMNTKRDENDKLIRDVKVITLKSKLVSDFRKDFQFYKVREINNYHHAHDAYLNAVVGTALIKKYPKLESEFVYGDYKVYDVRKMIAKSEQEIGKATAKYFFYSNIMNFFKTEIKLANGEIRKRPLIETNEETGEIVWDKERDFATVRKVLSMPQVNIVKKTEVQTGGFSKESILPKRESDKLIARKKDWDPKKYGGFDSPTVAYSVLVVAKVEKGKSKKLKTVKELLGITIMERSSFEKDPVAFLEAKGYKDVKKDLIIKLPKYSLFELENGRKRMLASAGELQKGNELALPSKYVNFLYLASHYEKLKGKPEDEEQKQLFVEQHKHYLDEIIEQISEFSERVILADKNLEKVLSAYSKHRDKSISEQAENIIHLFTLTNLGAPAAFKYFDTTIDRKRYTSTKEVLNATLIHQSITGLYETRIDLSQLGGD

SEQ ID NO: 79 - protein, 1368 aa, synthetic construct
MDKKYSIGLDIGTNSVGWAVITDEYKVPSKKFKVLGNTDRHSIKKNLIGALLFDSGETAEATRLKRTARRRYTRRKNRICYLQEIFSNEMAKVDDSFFHRLEESFLVEEDKKHERHPIFGNIVDEVAYHEKYPTIYHLRKKLADSTEKADLRLIYLALAHIIKFRGHFLIEGDLNSENSDVQKLFIQLVQTYNQLFEENPINEEGVDAKAILSAKLSKSRRLENLIAQLPGEKKNGLFGNLIALSLGLTPNFKSNFDLAEDAKLQLSKDTYDEDLENLLAQIGDQYADLFLAAKNLSDAILLSDILTVNSEITKAPLSASMIKRYDEHHQDLTLLKALVRQQLPEKYKEIFFDESKNGYAGYIDGGASQEEFYKYIKPILEKMDGTEELLEKINREDFLRKQRTFDNGSIPHQIHLGELHAILRRQEDYYPFLKENREKIEKILTFRIPYYVGPLARGNSRFAWMTRKSEETITPWNFEEVVDKEASAQAFIERMTNFDKNLPTEKVLPKHSLLYEKFTVYNELTKVKYVTEGMGKPEFLSAEQKQEIVDLLFKKNRKVTVKQLKEDYFKEIECFDSVEISGVEDRFNASLGTYHDLLKIIKDKEFLDNEENEDILEDIVLTLTLFEDREMIEERLKKYADLFDKKVLKQLKRRRYTGWGRLSKKLINGIRDKQSGKTILDFLKSDGFANRNFMQLIHDDSLTFKEEIKKAQVSGQGDSLHEHIANLAGSPAIKKGILQTVKVVDELVKVMGRHKPENIVIEMARENQTTQKGQKNSRERMKRLEEGIKELGSQILKEHPVENTQLQNDKLYLYYLQNGKDMYTGEELDIDRLSDYDVDHIIPQSFIKDDSIDNKVLTSSEKARGKSDNVPSEEVVKKMKNYWRQLLNAKLISQRKFDNLTKAERGGLSELDKAGFIKRQLVETRQITKHVAQILDSRMNTKYDENDKLIREVKVITLKSKLVSDFRKDFQFYKVREINNYHHAHDAYLNAVVGTALIKKYPKLESEFVYGDYKVYDVRKMIAKSEQEIGKATAKYFFYSNIMNFFKTEITLANGEIRKRPLIETNGETGEIVWDKGRDFATVRKVLSMPQVNIVKKTEVQTGGFSKESILPKRNSDKLIARKKDWDTKKYGGFDSPTVAYSVLVVAKVEKGKAKKLKTVKELVGITIMERSSFEKNPIAFLEAKGYKNIQEDLIIKLPKYSLFELENGRKRLLASAGELQKGNELALPNKYVTLLYHASHYEKLKGSPEDEEKKLLYVEQHRSYFDEILEQISEFSKRYILADKNLEKILELYNKFRDKSIEEQAESFINLFTFTALGAPAAFKFFDTTIDRKRYTSTKEILNSTLIHQSITGLYETRIDLSQLGGD

SEQ ID NO: 80 - protein, 1368 aa, synthetic construct
MKKSYSIGLDIGTNSVGWAVITDEYKVPSKKFKVLGNTDRKSIKKNLLGALLFDSGETAEATRLKRTARRRYTRRKNRIRYLQEIFSEEMAKVDDSFFHRLEESFLVEEDKKHERHPIFGNIVDEVAYHEKYPTIYHLRKKLADSDEKADLRLIYLALAHIIKFRGHFLIEGDLNSDNSDVQKLFIQLVQTYNQLFEESVINEIGVDAKAILSARLSKSRRLENLIAQFPGEKRNGLFGNLIALSLGLTPNFKSNFDLAEDAKLQFSKDTYDEDLDNLLAQIGDQYADLFLAAKNLSDAILLSGILTVNSESTKAPLSASMIKRYDEHHQDLTLLKALVREQLPEKYKEIFFDQSKNGYAGYIDGGASQEEFYKYIKPILEKMDGTEELLAKLNREDFLRKQRTFDNGSIPHQIHLGELHAILRRQEDFYPFLKENREKIEKILTFRIPYYVGPLARGNSRFAWMTRKSDETITPWNFEEVVDKGASAQAFIERMTNFDKNLPNEKVLPKHSLLYEYFTVYNELTKVKYITEGMRKPEFLSGEQKKAIVDLLFKKNRKVTVKQLKEDYFKKIECFDSVEISGVEDRFNASLGTYHDLLKIIKDKDFLDNEENEDILEDIILTLTLFEDREMIEERLKKYAHLFDKKVLKQLKRRRYTGWGRLSGKLINGIRDKQSGKTILDFLKSDGFANRNFMQLIHDDSLTFKEIIQKAQVSGQGDSLHEHIANLAGSPAIKKGILQSIKIVDELVKVMGRHDPENIVIEMARENQTTQKGQKNSRERMKRIEEGIKELGSQILKEHPVENTQLQNEKLYLYYLQNGRDMYVDQELDINRLSDYDVDHIVPQSFLKDDSIDNKVLTRSDKARGKSDNVPSEEVVKKMKNYWRQLLNAKLITQRKFDNLTKAERGGLSELDKAGFIKRQLVETRQITKHVAQILDSRFNTERDENDKLIREVKIVTLKSKLVSDFRKDFGFYKVREINDYHHAHDAYLNAVVGTALIKKYPKLESEFVYGDYKVYDVRKMIAKSEQEIGKATAKYFFYSNIMNFFKTEITLANGEVRKRPMIETNEETGEIVWDKTKDFATVRKVLSMPQVNIVKKTEVQTGGFSKESILPKRNSDKLIARKKDWDTKKYGGFDSPTVAYSVLVVADVEKGKAKKLKTVKELVGITIMERSSFEKNPVAFLETKGYQNVQKDLIIKLPKYSLFELENGRKRLLASAGELQKGNELALPQKYVTLLYHASHYEKLKGKSEDEEHKLEYVKQHRDEFDEILDQIEEFSKRYILADKNLEKIKELYAENRDSSINELAENFIHLFTFTSLGAPAAFKFFDKTIDRKRYTSTTEILNATLIHQSITGLYETRIDLSQLGGD

SEQ ID NO: 81 - protein, 1368 aa, synthetic construct
MKKKYSIGLDIGTNSVGWAVITDEYKVPSKKFKVLGNTDRQSIKKNLIGALLFDSGETAEATRLKRTARRRYTRRKNRIRYLQEIFAEEMNKVDDSFFHRLEESFLVEEDKRNERHPIFGNIVDEVAYHEKYPTIYHLRKKLADSTEKADLRLIYLALAHIIKFRGHFLIEGDLNSDNSDVQKLFIQLVQTYNQLFEENPLNEEGVDAKAILSAKLSKSRRLENLIALFPTEKKNGLFGNLIALSLGLTPNFKSNFDLSEDAKLQLSKDTYDEDLENLLAQIGDQYADLFLAAKNLSDAILLSGILTVNDEITKAPLSASMIKRYDEHHQDLTLLKALVRQQLPEKYKEIFFDQSKNGYAGYIDGGASQEDFYKYIKPILEKMDGTEEFLEKINREDFLRKQRTFDNGSIPHQIHLGELHAILRRQEEYYPFLKENQEKIEKILTFRIPYYVGPLARGNSRFAWMTRKSDETITPWNFEEVVDKEASAQAFIERMTNFDKNLPTEKVLPKHSLLYEKFTVYNELTKVKYVTEGMGKPEFLSAEQKQEIVDLLFKKNRKVTVKQLKEDYFKKIECFDSVEISGVEDRFNASLGTYHDLLKIIKDKDFLDNEENEDILEDIVLTLTLFEDREMIEERLKKYAHLFDKKVLKQLKRRRYTGWGRLSKKLINGIRDKQSGKTILDFLISDGFANRNFMQLIHDDSLTFKEEIKKAQEIGQGDSLHEQIANLAGSPAIKKGILQTVKIVDEIVKVMGRHKPENIVIEMARENQTTQKGQKNSRERLKRIEEGLKELGSQILKEHPVENTQLQNDKLYLYYLQNGKDMYTGEELDIDRLSDYDVDHIIPQSFIKDDSIDNKVLTSSDKARGKSDDVPSEEVVKKMKNYWRQLLNAKLISQRKFDNLTKAERGGLSELDKAGFIKRQLVETRQITKHVAQILDSRFNTERDENDKLIRDVKIITLKSKLVSDFRKDFGFYKVREINDYHHAHDAYLNAVVGTALIKKYPKLESEFVYGDYKVYDVRKMIAKSEQEIGKATAKRFFYSNIMNFFKTDIKLANGEIRKRPLIETNEETGEIVWDKEKDFATVRKVLSMPQVNIVKKTEVQTGGFSKESILPKRDSDKLIARKKDWDTKKYGGFDSPTVAYSVLVVAKVEKGKTKKLKTVKELVGITIMERSRFEKDPVAFLEAKGYQEIQEDLIIKLPKYSLFELENGRKRLLASAGELQKGNELALPSKYVTFLYLASHYEKLKGSPEDNEKKLEYVEQHRYYFDEIFEQISEFSKRYILADKNLEKILELYNQHRDAPIEELAESFINLFTFTALGAPAAFKFFGTTIDRKRYTSTKEILNSTLIHQSITGLYETRIDLSQLGGD

SEQ ID NO: 82 - protein, 1368 aa, synthetic construct
MDKKYSIGLDIGTNSVGWAVITDEYKVPSKKFKVLGNTDRQSIKKNLIGALLFDSGETAEATRLKRTARRRYTRRKNRIRYLQEIFAEEMAKVDDSFFHRLEESFLVEEDKKHERHPIFGNIVDEVAYHEKYPTIYHLRKKLADSTEKADLRLIYLALAHIIKFRGHFLIEGDLNSENSDVDKLFIQLVQTYNQLFEENPINESGVDAKAILSAKLSKSRRLENLIAQLPGEKRNGLFGNLIALSLGLTPNFKSNFDLAEDAKLQLSKDTYDEDLDNLLAQIGDQYADLFLAAKNLSDAILLSDILTVNSEITKAPLSASMIKRYDEHHQDLTLLKALVREQLPEKYKEIFFDQSKNGYAGYIDGGASQEEFYKYIKPILEKMDGTEELLAKLNREDLLRKQRTFDNGSIPHQIHLGELHAILRRQEDFYPFLKENREKIEKILTFRIPYYVGPLARGNSRFAWMTRKSEETITPWNFEEVVDKGASAQAFIERMTNFDKNLPTEKVLPKHSLLYEYFTVYNELTKVKYVTEGMRKPEFLSGEQKKEIVDLLFKKNRKVTVKQLKEDYFKKIECFDSVEISGVEDRFNASLGTYHDLLKIIKDKDFLDNEENEDILEDIVLTLTLFEDREMIEERLKKYAHLFDKKVLKQLKRRRYTGWGRLSRKLINGIRDKQSGKTILDFLKSDGFANRNFMQLIHDDSLTFKEAIQKAQVSGQGDSLHEQIANLAGSPAIKKGILQTIKIVDELVKVMGRHKPENIVIEMARENQTTQKGQKNSRERMKRLEEGIKELGSQILKEHPVENTQLQNEKLYLYYLQNGKDMYTGQELDIDRLSDYDVDHIIPQSFIKDDSIDNKVLTSSDKARGKSDNVPSEEVVKKMKNYWRQLLNAKLISQRKFDNLTKAERGGLSELDKAGFIKRQLVETRQITKHVAQILDSRMNTKYDENDKLIRDVKIITLKSKLVSDFRKDFQFYKVREINNYHHAHDAYLNAVVGTALIKKYPKLESEFVYGDYKVYDVRKMIAKSEQEIGKATAKRFFYSNIMNFFKTEITLANGEIRKRPLIETNEETGEIVWDKEKDFATVRKVLSMPQVNIVKKTEVQTGGFSKESILPKRNSDKLIARKKDWDPKKYGGFDSPTVAYSVLVVAKVEKGKSKKLKTVKELVGITIMERSSFEKDPVDFLEAKGYKEVQKDLIIKLPKYSLFELENGRKRMLASAGELQKGNELALPSKYVTFLYLASHYEKLKGSPEDEEKKQLYVEQHKHYFDEILEQISEFSKRYILADANLEKILSLYNQFEDKPIEEQAESFINLFTLTALGAPAAFKFFDTTIDRKRYTSTKEILDSTLIHQSITGLYETRIDLSQLGGD

SEQ ID NO: 83 - protein, 1368 aa, synthetic construct
MKKKYSIGLDIGTNSVGWAVITDEYKVPSKKFKVLGNTDRQSIKKNLIGALLFDSGETAEATRLKRTARRRYTRRKNRIRYLQEIFSEEMSKVDDSFFHRLEESFLVEEDKRHERHPIFGNIVDEVAYHEKYPTIYHLRKKLADSTQKADLRLIYLALAHIIKFRGHFLIEGDLNPENSDVQKLFIQLVQTYNQLFEENILNESRVDAKAILSARLSKSRRLENLIAQLPGEKKNGLFGNLIALSLGLTPNFKSNFDLSEDAKLQLSKDTYDEDLDNLLAQIGDEYADLFLAAKNLSDAILLSGILTVNDESTKAPLSASMIKRYDEHHQDLTLLKALVRQQLPEKYKEIFFDQSKNGYAGYIDGGASQEEFYKYIKPILEKMDGTEYLLAKINREDFLRKQRTFDNGSIPHQIHLGELHAILRRQEDFYPFLKENREKIEKILTFRIPYYVGPLARGNSRFAWLTRKSEETITPWNFEEVVDKEASAQAFIERMTNFDKNLPNEKVLPKHSLLYEMFTVYNELTKVKYVTEGMRKPEFLSSGQKEEIVDLLFKKNRKVTVKQLKEFYFKKIECFSSVEISGVEDRFNASLGTYHDLLKIIKDKDFLDNEENEDILEDIVLTLTLFEDREMIEERLKKYAHLFDKKVLKKLKRRRYTGWGRLSRKLINGIRDKQSGKTILDFLKDDGFANRNFMQLIHDDSLTFKEDIQKAQVKGEGESLHEQIANLAGSPAIKKGILQSIKIVDELVKVMGRHAPENIVIEMARENQTTQKGQKNSRERMKRIEEGIKELGSQILKEHPVENTQLQNEKLYLYYLQNGRDMYVDQELDINRLSDYDVDHIVPQSFLKDDSIDNKVLTRSDKARGKSDNVPSEEVVKKMKNYWRQLLNAKLITQRKFDNLTKAERGGLSELDKAGFIKRQLVETRQITKHVAQILDSRFNTEYDENDKLIREVKIITLKSKLVSDFRKDFQFYKVREINNYHHAHDAYLNAVVGTALIKKYPKLESEFVYGDYKVYDVRKMIAKSDQEIGKATAKYFFYSNIMNFFKTEITLANGEVRKRPLIETNEETGEIVWDKTKDFATVRKVLSMPQVNIVKKTEVQTGGFSKESILPKRNSDKLIARKKDWDPKKYGGFDSPTVAYSVLVVAKVEKGKSKKLKTVKELVGITIMERSSFEKDPVAFLESKGYKNIQKDLIIKLPKYSLFELENGRKRLLASAGELQKGNELALPQHYVTLLYLASRYEKLKGKPEDNEKKRNYVDQHRQEFDEILDQISEFSKRYILADANLDKILSLYNENRDASISELAENFIHLFTFTSLGAPAAFKFFDSDIDRKRYTSTKEVLNATLIHQSITGLYETRIDLSKLGGD

SEQ ID NO: 84 - protein, 1368 aa, synthetic construct
MDKKYSIGLDIGTNSVGWAVITDEYKVPSKKFKVLGNTDRHSIKKNLIGALLFDSGETAEATRLKRTARRRYTRRKNRIRYLQEIFSEEMAKVDDSFFHRLEESFLVEEDKRNERHPIFGNIVDEVAYHEKYPTIYHLRKKLADSTEKADLRLIYLALAHIIKFRGHFLIEGDLNSENSDVQKLFIQLVQTYNNLFEENPITEEGVDAKAILSAKLSKSRRLENLIAEFPGEKKNGLFGNLIALSLGLTPNFKSNFDLSEDAKLQFSKDTYDEDLDNLLAQIGDQYADLFLAAKNLYDAILLSGILTVNTEITKAPLSASMIKRYDEHHQDLTLLKKLVREQLPEKYKEIFFDESKNGYAGYIDGGASQEEFYKYIKPILEKMDGSEYLLVKLEREDFLRKQRTFDNGSIPHQIHLGELHAILRRQEDFYPFLKENREKIEKILTFRIPYYVGPLARGNSRFAWMTRKSEETITPWNFEEVVDKEASAQSFIERMTNFDKNLPNEKVLPKHSLLYEYFTVYNELTKVKYVTEGMRKPAFLSGEQKKEIVDLLFKTNRKVTVKQLKEDLFKKIECFDSVEISGVEDRFNASLGTYHDLLKIIKDKDFLDNEENEDILEDIILTLTLFEDREMIEERLDKYAHLFDKKVLKKLKRRRYTGWGRLSKKLINGIRDKQSGKTILDFLKDDGFANRNFMQLIHDDSLTFKEEIKKAQVIGQTDSLHEVIADLAGSPAIKKGILQSIKIVDELVKVMGRHNPENIVIEMARENQTTQKGQKNSRERMKRLEESIKELGSQILKEHPVENTQLQNDKLYLYYLQNGKDMYTGEELDIDRLSDYDVDHIIPQSFIKDDSIDNKVLTSSDEARGKSDNVPSEEVVKKMKSYWRQLLNAKLISQRKFDNLTKAERGGLSELDKAGFIKRQLVETRQITKHVAQILDSRFNTKYDENDKLIREVKIITLKSKLVSDFRKDFQFYKVREINDYHHAHDAYLNAVVGTALIKKYPKLESEFVYGDYKVYNSRKMIAKSEQEIGKATAKYFFYSNIMNFFKSDITLANGEIRKRPLIETNEETGEIVWDKEKDFATVRKVLSMPQVNIVKKTEVQTGGFSKESILPKRNSDKLIARKKDWDTKKYGGFDSPTVAYSVLVVAKVEKGKSKKLKTVKELVGITIMERSSFEKDPIAFLEAKGYKNVQKDLIIKLPKYSLFELENGRKRLLASAGELQKGNELALPNKYVTLLYHAKHYEKLKGSPEDNEQKMEYVEQHKYYFDEILEQISEFSERYILADKNLEKIKSLYKENADKDIEELASSFINLFTFTALGAPAAFKFFDTTIDRKRYTSTTEILDATLIHQSITGLYETRIDLSQLGGD

SEQ ID NO: 85 - protein, 1368 aa, synthetic construct
MKKKYSIGLDIGTNSVGWAVITDEYKVPSKKFKVLGNTDRQSIKKNLLGALLFDSGETAEATRLKRTARRRYTRRKNRIRYLQEIFSEEMAKVDDSFFHRLEESFLVEEDKRHERHPIFGNIVDEVAYHEKYPTIYHLRKELADSTEKADLRLIYLALAHMIKFRGHFLIEGDLNSENSDVQKLFIQLVQTYNQLFEENPINEETVDAKAILSAKLSKSRRLENLIAQLPGEKKNGLFGNLIALSLGLTPNFKSNFGLSEDAKLQLSKDTYDEDLENLLAQIGDQYADLFLAAKNLSDAILLSDILTVNDEITKAPLSASMIKRYDEHHQDLTLLKALVRQQLPEKYKEIFFDESKNGYAGYIDGGASQEEFYKFIKPILEKMDGAEYLLAKINREDFLRKQRTFDNGSIPHQIHLGELHAILRRQEEFYPFLKENREKIEKILTFRIPYYVGPLARGNSRFAWMTRKSDETITPWNFEEVVDKEASAQAFIERMTNFDKNLPNEKVLPKHSLLYEKFTVYNELTKVKYVTEGMRKPEFLSSEQKQEIVDLLFKKNRKVTVKQLKEFYFKKIECFDSVEISGVEDRFNASLGTYHDLLKIIKDKAFLDNEENEDILEDIVLTLTLFEDREMIEERLEKYANLFDDKVLKKLKRRRYTGWGRLSKKLINGIKDKQSGKTILDFLKSDGFANRNFMQLIHDDSLTFKEEIKKAQVKGQGDSLHEQIANLAGSPAIKKGILQSVKIVDELVKVMGRHKPENIVIEMARENQTTQKGQKNSRERMKRLEESIKELGSKILKEHPVENTQLQNDKLYLYYLQNGKDMYTGQELDIDRLSDYDVDHIIPQSFIKDDSIDNKVLTSSEKARGKSDNVPSEEVVKKMKSYWRQLLNAKLISQRKFDNLTKAERGGLSELDKAGFIKRQLVETRQITKHVAQILDSRFNTKYDENDKLIREVKIITLKSKLVSDFRKDFQFYKVREINNYHHAHDAYLNAVVGTALIKKYPKLESEFVYGDYKVYDVYKMVAKSEQEIGKATAKRFFYSNIMNFFKTEIKLANGTIRKRPLIETNEETGEIVWDKTKDFATVRKVLSMPQVNIVKKTEVQTGGFSKESILPKRNSDKLIARKKDWDTKKYGGFDSPTVAYSVLVVAKVEKGKSKKLKTVKELVGITIMERSSFEKNPVAFLEDKGYQNIQEDLIIKLPKYSLFELENGRKRLLASAGELQKGNELALPQKYVTFLYLASHYEKLKGKPEDEEKKQLFVEQHKSYFDEIMDQISEFSERYILADANLEKILSLYNEFEDKSIEEQAESFINLFTFTALGAPAAFKFFDTTIDRKRYTSTKEILNATLIHQSITGLYETRIDLSQLGGD

SEQ ID NO: 86 - protein, 1368 aa, synthetic construct
MDKKYSIGLDIGTNSVGWAVITDEYKVPSKKFKVLGNTDRHSIKKNLIGALLFDSGETAEATRLKRTARRRYTRRKNRICYLQEIFSNEMAKVDPSFFERLEESFLVEEDKKTSRHPIFGNIVEEVAYHEKYPTIYHLRKKLVDSKEKADLRLIYLALAHMIKFRGHFLIEGDLNPDNSDVDKLFIQLVQTYNQLFEENPINASGVDAKAILSARLSKSRRLENLIAQLPGEKKNGLFGNLIALSLGLTPNFKSNFDLAEDAKLQLSKDTYDDDLDNLLAQIGDQYADLFLAAKNLSDAILLSDILRVNTSDTNAPLSASMIKRYDDHHQDLTKLKELVRKELPEKYKEIFFDQNKNGYAGYIDGGATQEEFYKYIKPILESMKGTKELLEKLEKRDLLRKQRTFDNGSIPHQIHLGELRAILKRQEKFYPFLKENREKIEKILTFRIPYYVGPLARGNSRFAWMTRKSEETITPWNFEEVVDKGASAQSFIERMTNFDKNLPNEKVLPKHSLLYEYFTVYNELTKVKYVTEGMRKPAFLSGEQKKAIVDLLFKTNRKVTVKQLKEDYFKKIECFDSVEISGVEDRFNASLGTYHDLLKIIKDKDFLDNEENEDILEDIVLTLTLFEDREMIEERLKTYAHLFDDKVMKQLKRRRYTGWGRLSRKLINGIRDKQSGKTILDFLKSDGFANRNFMQLIHDDSLTFKEDIQKAQVSGQGDSLHEHIANLAGSPAIKKGILQTVKVVDELVKVMGRHKPENIVIEMARENQTTQKGQKNSRERMKRIEEGIKELGSQILKEHPVENTQLQNEKLYLYYLQNGRDMYVDQELDINRLSDYDVDHIVPQSFLKDDSIDNKVLTRSDKARGKSDNVPSEEVVKKMKNYWRQLLNAKLITQRKFDNLTKAERGGLSELDKAGFIKRQLVETRQITKHVAQILDSRMNTKYDENDKLIREVKVITLKSKLVSDFRKDFQFYKVREINNYHHAHDAYLNAVVGTALIKKYPKLESEFVYGDYKVYDVRKMIAKSEQEIGKATAKYFFYSNIMNFFKTEITLANGEIRKRPLIETNGETGEIVWDKGRDFATVRKVLSMPQVNIVKKTEVQTGGFSKESILPKRNSDKLIARKKDWDPKKYGGFDSPTVAYSVLVVAKKPVGKKKKLVEVKELLGITIMERSKFEKDPLGFLKEKGYEDVKMDKIIKLPKYSLFELGNGRKRMLASAGELQKGNELALPSEYVNFLYLASNYEKLKGSPEEIKEKQKYVEENKSYLDEIIKQISEFSKRVIKADANLKKVLEAYEKHKDKPISEQAENIIHLFTLTALGAPAAFKYFDETIDRKRYTSTKEVLDATLIHQSITGLYETRIDLKFLGGD

SEQ ID NO: 87 - protein, 1368 aa, synthetic construct
MDKKYSIGLDIGTNSVGWAVITDEYKVPSKKFKVLGNTDRHSIKKNLIGALLFDSGETAEATRLKRTARRRYTRRKNRICYLQEIFSNEMAKVDDSFFHRLEESFLVEEDKRHERHPIFGNIVDEVAYHEKYPTIYHLRKKLADSTEKADLRLIYLALAHIIKFRGHFLIEGDLNPENSDVDKLFIQLVQTYNQLFEENPINEEGVDAKAILSAKLSKSRRLENLIAQLPGEKRNGLFGNLIALSLGLTPNFKSNFDLAEDAKLQLSKDTYDEDLDNLLAQIGDQYADLFLAAKNLSDAILLSDILTVNDEITKAPLSASMIKRYDEHHQDLTLLKALVRQQLPEKYKEIFFDQSKNGYAGYIDGGASQEEFYKFIKPILEKMDGTEELLAKLNREDFLRKQRTFDNGSIPHQIHLGELHAILRRQEDFYPFLKENREKIEKILTFRIPYYVGPLARGNSRFAWMTRKSEETITPWNFEEVVDKGASAQAFIERMTNFDKNLPEEKVLPKHSLLYEYFTVYNELTKVKYVTEGMGKPEFLSGEQKEEIVDLLFKKNRKVTVKQLKEFYFKEIECFDSVEISGVEDRFNASLGTYHDLLKIIKDKDFLDNEENEDILEDIVLTLTLFEDREMIEERLKKYADLFDKKVLKQLKRRRYTGWGRLSKKLINGIRDKQSGKTILDFLKSDGFANRNFMQLIHDDSLTFKEEIKKAQVKGQGDSLHEHIANLAGSPAIKKGILQTVKVVDELVKVMGRHKPENIVIEMARENQTTQKGQKNSRERMKRLEEGIKELGSQILKEHPVENTQLQNEKLYLYYLQNGKDMYTGQELDIDRLSDYDVDHIIPQSFIKDDSIDNKVLTSSEKARGKSDNVPSEEVVKKMKSYWRQLLNAKLISQRKFDNLTKAERGGLSELDKAGFIKRQLVETRQITKHVAQILDSRMNTKYDENDKLIREVKVITLKSKLVSDFRKDFQFYKVREINNYHHAHDAYLNAVVGTALIKKYPKLESEFVYGDYKVYDVRKMIAKSEQEIGKATAKYFFYSNIMNFFKTEITLANGEIRKRPLIETNGETGEIVWDKGRDFATVRKVLSMPQVNIVKKTEVQTGGFSKESILPKRESDKLIARKKDWDPKKYGGFDSPTVAYSVLVVAKVEKGKAKKLKTVKELVGITIMERSSFEKDPVAFLEAKGYKEVQKDLIIKLPKYSLFELENGRKRLLASAGELQKGNELALPQKYVTFLYLASHYEKLKGSPEDEEQKQLYVEQHRHYFDEILEQISEFSERYILADKNLEKILSLYNKFEDLSIKEQAESIINLFTLTALGAPAAFKFFDTTIDRKRYTSTKEILNSTLIHQSITGLYETRIDLSQLGGD

SEQ ID NO: 88 - protein, 1368 aa, synthetic construct
MDKKYSIGLDIGTNSVGWAVITDEYKVPSKKFKVLGNTDRHSIKKNLIGALLFDSGETAEATRLKRTARRRYTRRKNRICYLQEIFSNEMAKVDDSFFHRLEESFLVEEDKKHERHPIFGNIVDEVAYHEKYPTIYHLRKELADSTEKADLRLIYLALAHIIKFRGHFLIEGDLNSENSDVQKLFIQLVQTYNQLFEENHLNEEGVDAKAILSAKLSKSRRLENLIAQLPGEKRNGLFGNLLALSLGLTPNFKSNFGLSEDAKLQLSKDTYDEDLENLLAQIGDQYADLFVAAKNLSDAILLSGILTVNDESTKAPLSASMIKRYDEHHQDLTLLKALVRQQLPEKYKEIFFDESKNGYAGYIDGGASQEEFYKYIKPILEKMDGTEEFLAKINREDFLRKQRTFDNGSIPHQIHLGELHAILRRQEEFYPFLKENREKIEKILTFRIPYYVGPLARGNSRFAWMTRKSDETITPWNFEEVVDKEASAQAFIERMTNFDKNLPSEKVLPKHSLLYEYFTVYNELTKVKYVTEGMGKPEFFSGEQKQEIVDLLFKKNRKVTVKKLKEFLFKEIECFDIVEISGVEDAFNASLGTYHDLLKIIKDKDFLDNEENEDILEDIVLTLTLFEDREMIEKRLKKYADLFDKKVLKQLKRRRYTGWGRLSKKLINGIRDKQSGKTILDFLKSDGFANRNFMQLIHDDSLTFKEEIKKAQVKGQGDSLHEHIANLAGSPAIKKGILQTVKVVDELVKVMGRHKPENIVIEMARENQTTQKGQKNSRERMKRIEEGIKELGSQILKEHPVENTQLQNEKLYLYYLQNGRDMYVDQELDINRLSDYDVDHIVPQSFLKDDSIDNKVLTRSDKARGKSDNVPSEEVVKKMKNYWRQLLNAKLITQRKFDNLTKAERGGLSELDKAGFIKRQLVETRQITKHVAQILDSRMNTKYDENDKLIREVKVITLKSKLVSDFRKDFQFYKVREINNYHHAHDAYLNAVVGTALIKKYPKLESEFVYGDYKVYDVRKMIAKSEQEIGKATAKYFFYSNIMNFFKTEITLANGEIRKRPLIETNGETGEIVWDKGRDFATVRKVLSMPQVNIVKKTEVQTGGFSKESILPKRNSDKLIARKKDWDPKKYGGFDSPTVAYSVLVVAKVEKGKSKKLKSVKELLGITIMERSSFEKNPIDFLEAKGYKEVKKDLIIKLPKYSLFELENGRKRMLASAGELQKGNELALPSKYVNFLYLASHYEKLKGSPEDNEQKQLFVEQHKHYLDEIIEQISEFSKRVILADANLDKVLSAYNKHRDKPIREQAENIIHLFTLTNLGAPAAFKYFDTTIDRKRYTSTKEVLDATLIHQSITGLYETRIDLSQLGGD

SEQ ID NO: 89 - protein, 1368 aa, synthetic construct
MDKKYSIGLDIGTNSVGWAVITDEYKVPSKKFKVLGNTDRHSIKKNLIGALLFDSGETAEATRLKRTARRRYTRRKNRIRYLQEIFSEEMAKVDDSFFHRLEESFLVEEDKKHERHPIFGNIVEEVAYHEKYPTIYHLRKKLADSTEKADLRLIYLALAHMIKFRGHFLIEGDLNSDNSDVQKLFIQLVQTYNQLFEENPLNESGVDAKAILSARLSKSRRLENLIAQFPGEKKNGLFGNLIALSLGLTPNFKSNFDLAEDAKLQLSKDTYDEDLENLLAQIGDQYADLFLAAKNLSDAILLSDILTVNSEITKAPLSASMVKRYDEHHQDLTLLKALVRQQLPEKYKEIFFDQSKNGYAGYIDGGASQEEFYKYIKPILEKVDGSEEFLDKIEREDFLRKQRTFDNGSIPHQIHLQELHAILRRQEDFYPFLKENREKIEKILTFRIPYYVGPLARGNSRFAWMTRKSDETITPWNFEEVVDKEASAQSFIERMTNFDKNLPNEKVLPKHSLLYEYFTVYNELTKVKYVTEGMRKPEFLSGEQKQEIVDLLFKKNRKVTVKQLKEFLFKEFECFDSVEISGVEDRFNASLGTYHDLLKIIKDKDFLDNEENEDILEDIVLTLTLFEDREMIEERLKKYADLFDDKVLKQLKRRRYTGWGRLSKKLINGIRDKQSGKTILDFLKADGFANRNFMQLIHDDSLTFKEEIQKAQVSGQGESLHELIANLAGSPAIKKGILQTIKIVDELVKVMGRHAPENIVIEMARENQTTQKGQKNSRERMKRIEEGIKELGSQILKEHPVENTQLQNEKLYLYYLQNGRDMYVDQELDINRLSDYDVDHIVPQSFLKDDSIDNKVLTRSDKARGKSDNVPSEEVVKKMKNYWRQLLNAKLITQRKFDNLTKAERGGLSELDKAGFIKRQLVETRQITKHVAQILDSRFNTKYDENDKLIRDVKIITLKSKLVSDFRKDFQLYKVREINNYHHAHDAYLNAVVGTALIKKYPKLESEFVYGDYKVYDVRKMIAKSEQEIGKATAKYFFYSNIMNFFKTEVTLANGEIRKRPLIETNGETGEIVWDKEKDFATVRKVLSMPQVNIVKKTEVQTGGFSKESILPKRNSDKLIARKKDWDPKKYGGFDSPTVAYSVLVIAKVEKGKAKKLKTVKELVGITIMERSSFEKNPIAFLEAKGYKEVKKDLIIKLPKYSLFELENGRKRMLASAGELQKGNELALPQKYVTLLYLASHYEKLKGSPEDNEQKQLFVEQHKEYFDEIIEQISEFSKRYILADANLEKIKSLYEKNRDATIEEQAENFIHLLTFTALGAPAAFKFFDTTIDRKRYTSTKEILNATLIHQSITGLYETRIDLSQLGGD

SEQ ID NO: 90 - protein, 1368 aa, synthetic construct
MDKKYSIGLDIGTNSVGWAVITDEYKVPSKKFKVLGNTDRHSIKKNLIGALLFDSGETAEATRLKRTARRRYTRRKNRICYLQEIFSNEMAKVDDSFFHRLEESFLVEEDKKHERHPIFGNIVDEVAYHEKYPTIYHLRKKLADSTEKADLRLIYLALAHMIKFRGHFLIEGDLNPDNSDVDKLFIQLVQTYNQLFEENPINESGVDAKAILSAKLSKSRRLENLIAQLPGEKKNGLFGNLIALSLGLTPNFKSNFDLAEDAKLQLSKDTYDEDLDNLLAQIGDQYADLFLAAKNLSDAILLSDILTVNSEITKAPLSASMIKRYDEHHQDLTLLKALVRQQLPEKYKEIFFDQSKNGYAGYIDGGASQEEFYKYIKPILEKMDGTEYLLAKLNREDFLRKQRTFDNGSIPHQIHLGELHAILRRQEDFYPFLKENREKIEKILTFRIPYYVGPLARGNSRFAWMTRKSDETITPWNFEEVVDKEASAQAFIERMTNFDKNLPNEKVLPKHSLLYEYFTVYNELTKVKYVTEGMRKPEFLSGEQKEEIVDLLFKKNRKVTVKQLKEFLFKEIECFDSVEISGVEDRFNASLGTYHDLLKIIKDKDFLDNEENEDILEDIILTLTLFEDKEMIEERLKKYANLFDKKVLKQLKRRRYTGWGRLSKKLINGIRDKQSGKTILDFLKSDGFANRNFMQLIHDDSLSFKEAIKKAQVSGQGDSLHEHIANLAGSPAIKKGILQTVKVVDELVKVMGRHKPENIVIEMARENQTTQKGQKNSRERMKRIEEGIKELGSQILKEHPVENTQLQNEKLYLYYLQNGRDMYVDQELDINRLSDYDVDHIVPQSFLKDDSIDNKVLTRSDKARGKSDNVPSEEVVKKMKNYWRQLLNAKLITQRKFDNLTKAERGGLSELDKAGFIKRQLVETRQITKHVAQILDSRMNTKYDENDKLIREVKVITLKSKLVSDFRKDFQFYKVREINNYHHAHDAYLNAVVGTALIKKYPKLESEFVYGDYKVYDVRKMIAKSEQEIGKATAKYFFYSNIMNFFKTEITLANGEIRKRPLIETNGETGEIVWDKGRDFATVRKVLSMPQVNIVKKTEVQTGGFSKESILPKRDSDKLIARKKDWDPKKYGGFDSPTVAYSVLVVAKVEKGKSKKLKTVKELVGITIMERSSFEKDPVKFLEAKGYKEIQKDLIIKLPKYSLFELENGRKRMLASAGELQKGNELALPSKYVTLLYHASHYEKLKGKPEDEEQKQEYVEQHNHYFDEIFEQISEFSERYILADKNLEKILSLYSNNRDKSISEQAESFINLFTLTALGAPAAFKFFDTTIDRKRYTSTKEILDATLIHQSITGLYETRIDLSQLGGD

SEQ ID NO: 91 - protein, 1368 aa, synthetic construct
MKKKYSIGLDIGTNSVGWAVITDEYKVPSKKFKVLGNTDRHSIKKNLIGALLFDSGETAEATRLKRTARRRYTRRKNRICYLQEIFSEEMAKVDDSFFHRLEESFLVEEDKKHERHPIFGNIVDEVAYHENYPTIYHLRKELADSDEKADLRLIYLALAHIIKFRGHFLIEGDLNSENSDVQKLFIQLVQTYNQLFEENPINEEGVDAKAILTAKLSKSRRLENLIAQLPGEKKNGLFGNLIALSLGLTPNFKSNFELSEDAKLQLSKDTYDEDLDNLLGQIGDQYADLFLAAKNLSDAILLSDILTVNDEITKAPLSASMIKRYDEHHQDLTLLKALVREQLPEKYKEIFFDKSKNGYAGYIDGGASQEEFYKYIKPILEKLDGSEELLEKINREDFLRKQRTFDNGSIPHQIHLGELHAILRRQEVFYPFLKENQEKIEKILTFRIPYYVGPLARGNSRFAWMTRKSDETITPWNFEEVVDKGASAQAFIERMTNFDKNLPNEKVLPKHSLLYEYFTVYNELTKVKYITEGMGKPEFLDGEQKKEIVDLLFKKNRKVTVKQLKEDLFKKIECFDSVEISGVEDRFNASLGTYHDLLKIIKDKDFLDNEENEDILEDIVLTLTLFEDREMIEERLKKYANLFDKKVLKQLKRRRYTGWGRLSKKLINGIRDKQSGKTILDFLKSDGFANRNFMQLIHDDSLTFKEEIKKAQVIGQGDSLHEQIANLAGSPAIKKGILQTVKIVDEIVKVMGRHAPENIVIEMARENQTTQKGQKNSRERMKRIEEVLKKLGSQILKEHPVENTQLQNEKLYLYYLQNGKDMYTGEELDIDRLSDYDVDHIIPQSFIKDDSIDNKVLTSSKEARGKSDNVPSEEVVKKMKSYWRQLLNAKLISQRKFDNLTKAERGGLSELDKAGFIKRQLVETRQITKHVAQILDSRFNTERDENDKLIRNVKIITLKSKLVSDFRKDFGFYKVREINDYHHAHDAYLNAVVGTALIKKYPKLESEFVYGDYKVYDSRKMIAKSEQEIGKATAKMFFYSNIMNFFKTEIKLANGEIIKRPVIETNEETGEIVWDKGKDFATVRKVLSMPQVNIVKKTEVQTGGFSKESILPKRNSDKLIARKKDWDTKKYGGFDSPTVAYSVLVVAKVEKGKSKKLKTVKELVGITIMERSSFEKDPIAFLEAKGYQHIRKDLIIKLPKYSLFELENGRKRLLASAGELQKGNELALPNKYVTFLYLASHYEKLKGKPEDEEEKRLYVEQHKHYFDEILDQISEFSKRYILADKNLEKILDLYNKHEDYSINELASNFLNLFTLTSLGAPAAFKFFDTTIDRKRYTSTKEILNSTLIHQSITGLYETRIDLSQLGGD

SEQ ID NO: 92 - protein, 1368 aa, synthetic construct
MDKKYSIGLDIGTNSVGWAVITDEYKVPSKKFKVLGNTDRHSIKKNLIGALLFDSGETAEATRLKRTARRRYTRRKNRICYLQEIFSNEMAKVDDSFFHRLEESFLVPEDKRHERHPIFGNIVDEVAYHEKYPTIYHLRKKLADSDEKADLRLIYLALAHMIKFRGHFLIEGDLNSDNSDVNKLFKQLVQTYNQLFEENPINEETVDAKAILSEKLSKSRRLENLIAQFPGEKKNGLFGNLLALSLGLTPNFKSNFDLAEDAKLQLSKDTYDEDLENLLGQIGDQYADLFLAAKNLYDAILLSDILTVNDESTKAPLSASMVKRYEEHHQDLKLLKKLVREQLPEKYKEIFSDKSKNGYAGYIDGGTSQEEFYKYIKPILEKVDGSEEFLEKIEREDFLRKQRTFDNGSIPHQIHLGELHAILRRQEEYYPFLKENREKIEKILTFRIPYYVGPLARGNSRFAWMSRKSDEKITPWNFDEVVDKEASAQKFIERMTNNDTYLPNEKVLPKHSLLYEKFTVYNELTKVKYVTEGMRKPEFLSAEQKQEIFDLLFKKNRKVTKKKLKEDYFKKFECFDSVEISGVEDRFNASLGTYHDLLKIIKDKDFLDNEENEDILEDIVLTLTLFEDREMIKERLKKYADLFDDKQLKQLKRRHYTGWGRLSAKLINGIRDKQSGKTILDYLKEDGFANRNFMQLIHDDSLTFKEEIEKAQVSGQGDSLHEHIANLAGSPAIKKGILQTVKVVDELVKVMGRHKPENIVIEMARENQTTQKGQRNSRQRLKKLEEGIKELGSKILKEHPVENQQLQNDKLYLYYLQNGKDMYTGEELDIDRLSQYDIDHIIPQSFIKDDSIDNKVLVSSKKARGKSDDVPSEEVVKKMKNYWRQLLEAKLISQRKFDNLTKAERGGLSELDKAGFIKRQLVETRQITKHVAQILDSRMNTKYDENDKLIREVKVITLKSKLVSDFRKDFQFYKVREINNYHHAHDAYLNAVVGTALIKKYPKLESEFVYGDYKVYDVRKMIAKSEQEIGKATAKYFFYSNIMNFFKTEITLANGEIRKRPLIETNGETGEIVWDKGRDFATVRKVLSMPQVNIVKKTEVQTGGFSKESILPKRNSDKLIARKKDWDPKKYGGFDSPTVAYSVLVVAKVEKGKSKKLKSVKELLGITIMERSSFEKNPIDFLEAKGYKEVKKDLIIKLPKYSLFELENGRKRMLASAGELQKGNELALPSKYVNFLYLASHYEKLKGSPEDNEQKQLFVEQHKHYLDEIIEQISEFSKRVILADANLDKVLSAYNKHRDKPIREQAENIIHLFTLTNLGAPAAFKYFDTTIDRKRYTSTKEVLDATLIHQSITGLYETRIDLSQLGGD

SEQ ID NO: 93 - protein, 1368 aa, synthetic construct
MDKKYSIGLDIGTNSVGWAVITDEYKVPSKKFKVLGNTDRHSIKKNLIGALLFDSGETAEATRLKRTARRRYTRRKNRICYLQEIFSNEMAKVDDSFFHRLEESFLVEEDKKHERHPIFGNIVDEVAYHEKYPTIYHLRKKLADSTEKADLRLIYLALAHIIKFRGHFLIEGDLNPENSDVDKLFIQLVQTYNQLFEENPINEEGVDAKAILTAKLSKSRRLENLIAQFPGEKRNGLFGNLIALSLGLTPNFKSNFDLAEDAKLQLSKDTYDEDLENLLGQIGDQYADLFLAAKNLSDAILLSGILTVNSESTKAPLSASMIKRYDEHHQDLTLLKAFVRQQLPEKYKEIFFDESKNGYAGYIDGGASQEEFYKYIKPILEKLDGTEEFLAKLNREDFLRKQRTFDNGSIPHQIHLGELHAILRRQEEFYPFLKENREKIEKILTFRIPYYVGPLARGNSRFAWMTRKSEETITPWNFEEVVDKEASAQAFIERMTNFDKNLPTEKVLPKHSLLYEYFTVYNELTKVKYVTEGMGKPEFFDGEQKQEIFDGLFKKNRKVTVKQLKDFLFKEFEEFRIVDISGVEDAFNASLGTYHDLLKIIKDKDFLDNEENEDILEDIVLTLTLFEDREMIEKRLEKYADLFDKKVLKQLKRRRYTGWGRLSKKLINGIRDKQSGKTILDFLKSDGFANRNFMQLIHDDSLTFKEEIKKAQVEGQGDSLHEHIANLAGSPAIKKGILQTVKVVDELVKVMGRHKPENIVIEMARENQTTQKGQKNSRERMKRIEEGIKELGSQILKEHPVENTQLQNEKLYLYYLQNGRDMYVDQELDINRLSDYDVDHIVPQSFLKDDSIDNKVLTRSDKARGKSDNVPSEEVVKKMKNYWRQLLNAKLITQRKFDNLTKAERGGLSELDKAGFIKRQLVETRQITKHVAQILDSRMNTKYDENDKLIREVKVITLKSKLVSDFRKDFQFYKVREINNYHHAHDAYLNAVVGTALIKKYPKLESEFVYGDYKVYDVRKMIAKSEQEIGKATAKYFFYSNIMNFFKTEITLANGEIRKRPLIETNGETGEIVWDKGRDFATVRKVLSMPQVNIVKKTEVQTGGFSKESILPKRNSDKLIARKKDWDPKKYGGFDSPTVAYSVLVVAKVEKGKSKKLKSVKELLGITIMERSSFEKNPIDFLEAKGYKEVKKDLIIKLPKYSLFELENGRKRMLASAGELQKGNELALPSKYVNFLYLASHYEKLKGSPEDNEQKQLFVEQHKHYLDEIIEQISEFSKRVILADANLDKVLSAYNKHRDKPIREQAENIIHLFTLTNLGAPAAFKYFDTTIDRKRYTSTKEVLDATLIHQSITGLYETRIDLSQLGGD

SEQ ID NO: 94 - protein, 1368 aa, synthetic construct
MDKKYSIGLDIGTNSVGWAVITDEYKVPSKKFKVLGNTDRHSIKKNLIGALLFDSGETAEATRLKRTARRRYTRRKNRICYLQEIFSNEMAKVDDSFFHRLEESFLVEEDKKHERHPIFGNIVDEVAYHEKYPTIYHLRKKLADSTEKADLRLIYLALAHIIKFRGHFLIEGDLNPENSDVQKLFIQLVQTYNQLFEENPINEETVDAKAILSAKLSKSRRLENLIAQFPGEKKNGLFGNLIALSLGLTPNFKSNFDLSEDAKLQLSKDTYDEDLDNLLAQIGDQYADLFLAAKNLSDAILLSDILTVNDEITKAPLSASMIKRYDEHHQDLTLLKALVRQQLPEKYKEIFFDQSKNGYAGYIDGGASQEEFYKYIKPILEKMDGTEELLAKLNREDLLRKQRTFDNGSIPHQIHLGELHAILRRQEEFYPFLKENREKIEKILTFRIPYYVGPLARGNSRFAWMTRKSEETITPWNFEEVVDKGASAQAFIERMTNFDKNLPNEKVLPKHSLLYEYFTVYNELTKVKYVTEGMGKPEFLSGEQKKEIVDLLFKKNRKVTVKQLKEDYFKKIECFDSVEISGVEDRFNASLGTYHDLLKIIKDKDFLDNEENEDILEDIVLTLTLFEDKEMIEERLKKYANLFDKKVLKQLKRRRYTGWGRLSRKLINGIRDKQSGKTILDFLKSDGFANRNFMQLIHDDSLTFKEEIKKAQVSGQGDSLHEHIANLAGSPAIKKGILQTVKVVDELVKVMGRHKPENIVIEMARENQTTQKGQKNSRERMKRIEEGIKELGSQILKEHPVENTQLQNEKLYLYYLQNGRDMYVDQELDINRLSDYDVDHIVPQSFLKDDSIDNKVLTRSDKARGKSDNVPSEEVVKKMKNYWRQLLNAKLITQRKFDNLTKAERGGLSELDKAGFIKRQLVETRQITKHVAQILDSRMNTKYDENDKLIREVKVITLKSKLVSDFRKDFQFYKVREINNYHHAHDAYLNAVVGTALIKKYPKLESEFVYGDYKVYDVRKMIAKSEQEIGKATAKYFFYSNIMNFFKTEITLANGEIRKRPLIETNGETGEIVWDKGRDFATVRKVLSMPQVNIVKKTEVQTGGFSKESILPKRNSDKLIARKKDWDTKKYGGFDSPTVAYSVLVVAKVEKGKSKKLKTVKELVGITIMERSSFEKDPVAFLEDKGYKDIQKDLIIKLPKYSLFELENGRKRLLASAGELQKGNELALPNKYVTFLYHASHYEKLKGSPEDNEQKRLYVEQHRDYFDEILDQISEFSERYILADKNLEKIKSLYNEFEDKSIEELAESFINLFTLTALGAPAAFKFFDTTIDRKRYTSTKEILDATLIHQSITGLYETRIDLSQLGGD

SEQ ID NO: 95 - protein, 1368 aa, synthetic construct
MKKKYSIGLDIGTNSVGWAVITDEYKVPSKKFKVLGNTDRHSIKKNLIGALLFDSGETAEATRLKRTARRRYTRRKNRIRYLQEIFAEEMAKVDDSFFQRLEESFLVEEDKRNERHPIFGNIVDEVAYHEKYPTIYHLRKELVDSDEKADLRLIYLALAHMIKFRGHFLIEGDLNSENSDVQKLFIQLVQTYNQLFEESPLDEEGVDAKAILSDKVSKSRRLENLIALFPGEKKNGLFGNLIALSLGLTPNFKTNFVLAEDAKLQFSKDTYDEDLENLLGQIGDQYADLFLAAKNLSDAILLSGILRVDDESTKAPLSASMIKRYDEHHQDLTLLKTLVRQQLPEKYKEIFFDKTKNGYAGYIDGGASQEEFYKYIKPILEKMDGTEYLLDKLEREDLLRKQRTFDNGSIPHQIHLGELHAILRRQEDFYPFLKENQEKIEKILTFRIPYYVGPLARGNSRFAWMTRKSDETITPWNFEEVVDKGASAQAFIERMTNFDKNLPEEKVLPKHSLLYEKFTVYNELTKVKYVTEGMGKPEFLSANQKKEIVDLLFKKNRKVTVKKLKEFYFQKFDCFRIVEISGVEDRFNASLGTYHDLLKIIKDKEFLDNEANEEILEDIVLTLTLFEDREMIEKRLKKYAHLFDKKVMKQLKRRRYTGWGRLSKKLINGIRDKQSGKTILDFLISDGFANRNFMQLIHDDSLTFKEEIKKAQVKGQSDSLHEQIADLAGSPAIKKGILQTVKVVDELVKVMGRHKPENIVIEMARENQTTQKGQRNSRERLKRIEEGIKKLGSKILKEYPVENTQLQNDKLYLYYLQNGRDMYTGEELDIDRLSDYDVDHIVPQSFIKDDSIDNKVLTRSKEARGKSDDVPSEEVVRKMKSYWRQLLKAGLITQRKFDNLTKAERGGLSELDKAGFIKRQLVETRQITKHVAQILDSRMNTERDENDKLIRDVKVITLKSKLVSDFRKDFQFYKVREINDYHHAHDAYLNAVVGTALIKKYPKLESEFVYGDYKVYDSYKMIAKSEQEIGKATAKYFFYSNIMNFFKTEITLANGEIRKRPLIETNGETGEIVWDKGRDFATVRKVLSMPQVNIVKKTEVQTGGFSKESILPKRNSDKLIARKKDWDPKKYGGFDSPTVAYSVLVVAKVEKGKSKKLKSVKELLGITIMERSSFEKNPIDFLEAKGYKEVKKDLIIKLPKYSLFELENGRKRMLASAGELQKGNELALPSKYVNFLYLASHYEKLKGSPEDNEQKQLFVEQHKHYLDEIIEQISEFSKRVILADANLDKVLSAYNKHRDKPIREQAENIIHLFTLTNLGAPAAFKYFDTTIDRKRYTSTKEVLDATLIHQSITGLYETRIDLSQLGGD

SEQ ID NO: 96 - protein, 1368 aa, synthetic construct
MDKKYSIGLDIGTNSVGWAVITDEYKVPSKKFKVLGNTDRHSIKKNLIGALLFDSGETAEATRLKRTARRRYTRRKNRICYLQEIFSNEMAKVDDSFFHRLEESFLVEEDKRHERHPIFGNIVDEVAYHEKYPTIYHLRKKLADSTEKADLRLIYLALAHIIKFRGHFLIEGDLNSDNSDVQKLFIQLVQTYNQLFEENPLNESGVDAKAILSAKLSKSRRLENLIAQLPGEKKNGLFGNLIALSLGLTPNFKSNFGLSEDAKLQLSKDTYDEDLENLLAQIGDQYADLFLAAKNLSDAILLSDILTVNDEITKAPLSASMIKRYDEHHQDLTLLKALVRQQLPEKYKEIFFDKSKNGYAGYIDGGASQEEFYKYIKPILEKMDGAEELLAKINREDFLRKQRTFDNGSIPHQIHLGELHAILRRQEEFYPFLKENREKIEKILTFRIPYYVGPLARGNSRFAWMTRKSEETITPWNFEEVVDKEASAQAFIERMTNFDKNLPSEKVLPKHSLLYEYFTVYNELTKVKYVTEGMGKAEFFDANQKQEIFDGLFKKYRKVTKKRLLEFLDKEFDEFRIVDISGVEDAFNASLGTYHDLLKIIKDKDFLDNEENEDILEDIVLTLTLFEDREMIEERLEKYANLFDKKVLKQLKRRRYTGWGRLSKKLINGIRDKQSGKTILDFLKSDGFANRNFMQLIHDDSLTFKEEIQKAQVSGQGDSLHEHIANLAGSPAIKKGILQTVKVVDELVKVMGRHKPENIVIEMARENQTTQKGQKNSRERMKRIEEGIKELGSQILKEHPVENTQLQNEKLYLYYLQNGRDMYVDQELDINRLSDYDVDHIVPQSFLKDDSIDNKVLTRSDKARGKSDNVPSEEVVKKMKNYWRQLLNAKLITQRKFDNLTKAERGGLSELDKAGFIKRQLVETRQITKHVAQILDSRMNTKYDENDKLIREVKVITLKSKLVSDFRKDFQFYKVREINNYHHAHDAYLNAVVGTALIKKYPKLESEFVYGDYKVYDVRKMIAKSEQEIGKATAKYFFYSNIMNFFKTEITLANGEIRKRPLIETNGETGEIVWDKGRDFATVRKVLSMPQVNIVKKTEVQTGGFSKESILPKRNSDKLIARKKDWDPKKYGGFDSPTVAYSVLVVAKVEKGKSKKLKSVKELLGITIMERSSFEKNPIDFLEAKGYKEVKKDLIIKLPKYSLFELENGRKRMLASAGELQKGNELALPSKYVNFLYLASHYEKLKGSPEDNEQKQLFVEQHKHYLDEIIEQISEFSKRVILADANLDKVLSAYNKHRDKPIREQAENIIHLFTLTNLGAPAAFKYFDTTIDRKRYTSTKEVLDATLIHQSITGLYETRIDLSQLGGD

SEQ ID NO: 97 - protein, 1368 aa, synthetic construct
MDKKYSIGLDIGTNSVGWAVITDEYKVPSKKFKVLGNTDRKSIKKNLIGALLFDSGETAEATRLKRTARRRYTRRKNRIRYLQEIFAEEMAKVDDSFFHRLEESFLVEEDKRNERHPIFGNIVDEVAYHEKYPTIYHLRKKLVDSDEKADLRLIYLALAHMIKFRGHFLIEGDLNSDNSDVQKLFKELVQTYNQLFEEKPIDASGVDAKAILSEKLSKSRRLENLIAELPGEKKNGLFGNLIALSLGLTPNFKSNFDLEEDAKLQLSKDTYDDDLENLLGQIGDQYADLFLAAKNLSDAILLSGILRVNTEITKAPLSASMIKRYDEHHQDLTLLKQLVRQQLPEKYKEIFFDQSKNGYAGYIDGGASQEEFYKYIKKILEKMDGTEELLDKLNREDLLRKQRTFDNGSIPHQIHLGELHAILRRQEEYYPFLKENREKIEKILTFRIPYYVGPLARGNSRFAWMKRKSDETITPWNFEEVVDKGASAQAFIERMTNFDKNLPNEKVLPKHSLLYEYFTVYNELTKVKYVTEGMRKPEFLSGEQKKEIVDLLFKKNRKVTVKQLKEDYFKKEECFDSVEISGVEDRFNASLGTYHDLLKIIKDKDFLDNDENEDILEDIVLTLTLFEDREMIKERLEKYANLFDDKVMKQLKRRRYTGWGRLSKKLINGIRDKQSGKTILDFLIADGFANRNFMQLIHDDSLTFKDEIEKAQVIGKGESLHEHIANLAGSPAIKKGILQTVKVVDELVKVMGRHKPENIVIEMARENQTTQKGQKNSRERMKRIEEGIKELGSQILKEHPVENTQLQNEKLYLYYLQNGRDMYVDQELDINRLSDYDVDHIVPQSFLKDDSIDNKVLTRSDKARGKSDNVPSEEVVKKMKNYWRQLLNAKLITQRKFDNLTKAERGGLSELDKAGFIKRQLVETRQITKHVAQILDSRMNTEYDENDKLIRDVKVITLKSKLVSDFRKDFGFYKVREINNYHHAHDAYLNAVVGTALIKKYPKLESEFVYGDYKVYDVRKMIAKSEQEIGKATAKYFFYSNIMNFFKSEITLANGEIRKRPLIETNEETGEIVWDKEKDFATVRKVLSMPQVNIVKKTEVQTGGFSKESILPKRNSDKLIARKKDWDPTKYGGFDSPTVAYSVLVVAKIEKGKAKKLKTVKELLGITIMERSAFEKNPVAFLEDKGYQEVKEDLIIKLPKYSLFELENGRKRMLASAGELQKGNELALPSKYVNFLYLASHYEKLKGSTEDNKYKQLYVEQHREYLDEIIDQISEFSERVILADANLEKVKSAYEKHREKSIEEQAENIIHLFTLTALGAPAAFKYFDTTIDRKRYTSTKEVLNATLIHQSITGLYETRIDLSQLGGD

SEQ ID NO: 98 - protein, 1368 aa, synthetic construct
MDKKYSIGLDIGTNSVGWAVITDEYKVPSKKFKVLGNTDRHSIKKNLIGALLFDSGETAEATRLKRTARRRYTRRKNRICYLQEIFSNEMAKVDDSFFQRLEESFLVEEDKKNERHPIFGNIVDEVAYHEKYPTIYHLRKKLVDSDEKADLRLIYLALAHMIKFRGHFLIEGDLNSDNSDVQKLFIELVDTYNQLFEESPIEAEEVDAKAILSERLSKSRRLENLIAELPGEKKNGLFGNLIALSLGLTPNFKSNFDLSEDAKLQLSKDTYDDDLEELLGQIGDEYADLFLAAKNLSDAILLSGILRVKTESTKAPLSASMIKRYDEHHQDLTLLKQLVRKQLPEKYKEIFFDQSKNGYAGYIDGGASQEEFYKYIKKILEKMDGTEELLDKLDREDLLRKQRTFDNGSIPHQIHLGELRAILRRQEKYYPFLKENREKIEKILTFRIPYYVGPLARGNSRFAWMIRKSDETITPWNFDEVVDKGASAEKFIERMTNFDKNLPEEKVLPKHSLLYEYFTVYNELTKVKYVTEGMRKPEFLDGEQKKEIVDLLFKKNRKVTVKQLKEYYFKEFECFDSVEISGVEDRFNASLGTYHDLLKIIKDKAFLDNEENEKILEDIVLTLTLFEDREMIKKRLEKYANLFDKKVMKQLKRRRYTGWGRLSKKLINGIRDKQSGKTILDFLIDDGFTNRNFMQLIHDDSLTFKDEIEKAQVIGKGDSLHEHIANLAGSPAIKKGILQTVKVVDELVKVMGRHKPENIVIEMARENQTTQKGQKNSRERMKRIEEGIKELGSQILKEHPVENTQLQNEKLYLYYLQNGRDMYVDQELDINRLSDYDVDHIVPQSFLKDDSIDNKVLTRSDKARGKSDNVPSEEVVKKMKNYWRQLLNAKLITQRKFDNLTKAERGGLSELDKAGFIKRQLVETRQITKHVAQILDSRMNTKYDENDKLIREVKVITLKSKLVSDFRKDFQFYKVREINNYHHAHDAYLNAVVGTALIKKYPKLESEFVYGDYKVYDVRKMIAKSEQEIGKATAKYFFYSNIMNFFKTEITLANGEIRKRPLIETNGETGEIVWDKGRDFATVRKVLSMPQVNIVKKTEVQTGGFSKESILPKRNSDKLIARKKDWDPKKYGGFDSPTVAYSVLVVAKVEKGKSKKLKSVKELLGITIMERSSFEKNPIDFLEAKGYKEVKKDLIIKLPKYSLFELENGRKRMLASAGELQKGNELALPSKYVNFLYLASHYEKLKGSPEDNEQKQLFVEQHKHYLDEIIEQISEFSKRVILADANLDKVLSAYNKHRDKPIREQAENIIHLFTLTNLGAPAAFKYFDTTIDRKRYTSTKEVLDATLIHQSITGLYETRIDLSQLGGD

SEQ ID NO: 99 - protein, 1368 aa, synthetic construct
MDKKYSIGLDIGTNSVGWAVITDEYKVPSKKFKVLGNTDRHSIKKNLIGALLFDSGETAEATRLKRTARRRYTRRKNRICYLQEIFSNEMAKVDDSFFHRLEESFLVEEDKRHERHPIFGNIVDEVAYHEKYPTIYHLRKKLADSTEKADLRLIYLALAHIIKFRGHFLIEGDLNSDNSDVQKLFIQLVQTYNQLFEENPINESGVDAKAILSAKLSKSRRLENLIAQFPGEKKNGLFGNLIALSLGLTPNFKSNFDLAEDAKLQLSKDTYDEDLDNLLAQIGDQYADLFLAAKNLSDAILLSDILTVNSEITKAPLSASMIKRYDEHHQDLTLLKALVRKQLPEKYKEIFFDQSKNGYAGYIDGGASQEDFYKFIKPILEKMDGTEELLAKINREDFLRKQRTFDNGSIPHQIHLGELHAILRRQEEFYPFLKENREKIEKILTFRIPYYVGPLARGNSRFAWMTRKSEETITPWNFEEVVDKEASAQSFIERMTNFDKNLPEEKVLPKHSLLYEYFTVYNELTKVKYVTEGMRKPEFLSGEQKKEIVDLLFKKNRKVTVKQLKEFYFKKIECFDSVEISGVEDRFNASLGTYHDLLKIIKDKEFLDNEENEDILEDIVLTLTLFEDKEMIEERLKKYADLFDDKVLKKLKRRRYTGWGRLSRKLINGIRDKQSGKTILDFLKSDGFANRNFMQLIHDDSLTFKEEIKKAQVSGQGDSLHEHIANLAGSPAIKKGILQTVKVVDELVKVMGRHKPENIVIEMARENQTTQKGQKNSRERMKRIEEGLKELGSQILKEHPVENTQLQNEKLYLYYLQNGKDMYTGDELDIDRLSDYDVDHIIPQSFIKDDSIDNKVLTSSDKARGKSDNVPSEEVVKKMKNYWRQLLNAKLISQRKFDNLTKAERGGLSELDKAGFIKRQLVETRQITKHVAQILDSRMNTKYDENDKLIREVKVITLKSKLVSDFRKDFQFYKVREINNYHHAHDAYLNAVVGTALIKKYPKLESEFVYGDYKVYDVRKMIAKSEQEIGKATAKYFFYSNIMNFFKTEITLANGEIRKRPLIETNGETGEIVWDKGRDFATVRKVLSMPQVNIVKKTEVQTGGFSKESILPKRDSDKLIARKKDWDPKKYGGFDSPTVAYSVLVVAKIEKGKAKKLKTVKELVGITIMERSSFEKDPVAFLEDKGYKNIQEDLIIKLPKYSLFELENGRKRMLASAGELQKGNELALPSKYVTLLYLASHYEKLKGSPEDNEKKLLYVEQHRHYFDEIFDQISEFSERYILADKNLEKILSLYNENEDKSISEQAESFINLFTLTALGAPAAFKFFDTTIDRKRYTSTKEILNATLIHQSITGLYETRIDLSQLGGD

SEQ ID NO: 100 - protein, 1368 aa, synthetic construct
MDKKYSIGLDIGTNSVGWAVITDEYKVPSKKFKVLGNTDRHSIKKNLIGALLFDSGETAEATRLKRTARRRYTRRKNRICYLQEIFSNEMAKVDPSFFKRLEESFLVEEDKSGSRHPIFGNIVEEVAYHEKYPTIYHLRKKLVDSEEKADLRLIYLALAHMIKFRGHFLIEGDLNPDNSDVDKLFIQLVQTYNQLFEENPINASGVDAKAILSARLSKSRRLENLIAQLPGEKKNGLFGNLIALSLGLTPNFKSNFDLAEDAKLQLSKDTYDDDLDNLLAQIGDQYADLFLAAKNLSDAILLSDILRVNTKDTRAPLSASMIKRYDEHHQDLTELKKLVRKYLPEKYKEIFFDQNKNGYAGYIDGGATQEEFYEYIKPILESMPGTKHLLEKLENRDLLRKQRTFDNGSIPHQIHLGELRAILERQEKFYPFLKENREKIEKILSFRIPYYVGPLARGNSRFAWMTRKSEETITPWNFEEVVDKGASAQSFIERMTNFDKNLPNEKVLPKHSLLYEYFTVYNELTKVKYVTEGMRKPAFLSGEQKKAIVDLLFKTNRKVTVKQLKEDYFKKIECFDSVEISGVEDRFNASLGTYHDLLKIIKDKDFLDNEENEDILEDIVLTLTLFEDREMIEERLKTYAHLFDDKVMKQLKRRRYTGWGRLSRKLINGIRDKQSGKTILDFLKSDGFANRNFMQLIHDDSLTFKEDIQKAQVSGQGDSLHEHIANLAGSPAIKKGILQTVKVVDELVKVMGRHKPENIVIEMARENQTTQKGQKNSRERMKRIEEGIKELGSQILKEHPVENTQLQNEKLYLYYLQNGRDMYVDQELDINRLSDYDVDHIVPQSFLKDDSIDNKVLTRSDKARGKSDNVPSEEVVKKMKNYWRQLLNAKLITQRKFDNLTKAERGGLSELDKAGFIKRQLVETRQITKHVAQILDSRMNTKYDENDKLIREVKVITLKSKLVSDFRKDFQFYKVREINNYHHAHDAYLNAVVGTALIKKYPKLESEFVYGDYKVYDVRKMIAKSEQEIGKATAKYFFYSNIMNFFKTEITLANGEIRKRPLIETNGETGEIVWDKGRDFATVRKVLSMPQVNIVKKTEVQTGGFSKESILPKRKSDKLIARKKDWDPKKYGGFDSPTVAYSVLVVAKKPVGKKKELKEVKELLGITIMERSKFEENPLKFLEEKGYKDVKMDEIIKLPKYSLFELGNGRKRMLASAGELQKGNELALPSEYVNFLYLASNYEKLKGKPEEIKEKQEYVEKNKEYLDKIIDQISEFSQRVIKADANLKKVLEAYEKHKDKPIKEQAENIIHLFTLTRLGAPAAFKYFDETIDRKRYTSTKEVLDATLIHQSITGLYETRIDLSFLGGD

SEQ ID NO: 101 - protein, 1368 aa, synthetic construct
MDKKYSIGLDIGTNSVGWAVITDEYKVPSKKFKVLGNTDRQSIKKNLIGALLFDSGETAEATRLKRTARRRYTRRKNRIRYLQEIFAEEMSKVDDSFFHRLEESFLVEEDKKHERHPIFGNIVDEVAYHEKYPTIYHLRKKLADSTEKADLRLIYLALAHIIKFRGHFLIEGDLNSDNSDVQKLFIQLVDTYNQLFEENPIGEEGVDAKAILSARLSKSRRLENLIAQIPGEKRNGLFGNLIALSLGLTPNFKSNFDLAEDAKLQLSKDTYDEDLDNLLAQIGDQYADLFLAAKNLSDAILLSGILTVNDEITKAPLSASMIKRYDEHHQDLTLLKDLVRQQLPEKYKEIFFDDSKNGYAGYIDGGASQEEFYKYIKPILEKLDGAEELLAKLNREDFLRKQRTFDNGSIPHQIHLGELHAILRRQEDFYPFLKENREKIEKILTFRIPYYVGPLARGNSRFAWMTRKSEETITPWNFEEVVDKEASAQSFIERMTNFDKNLPNEKVLPKHSLLYEYFTVYNELTKVKYVTEGMRKPEFLSSEQKEAIVDLLFKKNRKVTVKQLKEDYFKKIECFDSVEISGVEDRFNASLGTYHDLLKIIKDKDFLDNEENEDILEDIVLTLTLFEDREMIEERLKKYAHLFDKKVLKQLKRRRYTGWGRLSRKLINGIRDKQSGKTILDFLKDDGFANRNFMQLIHDDSLTFKEEIQKAQVIGQGDSLHEQIANLAGSPAIKKGILQTLKIVDELVKVMGRHAPENIVIEMARENQTTQKGQKNSRERMKRIEEGIKELGSQILKEHPVENTQLQNEKLYLYYLQNGRDMYVDQELDINRLSDYDVDHIVPQSFLKDDSIDNKVLTRSDKARGKSDNVPSEEVVKKMKNYWRQLLNAKLITQRKFDNLTKAERGGLSELDKAGFIKRQLVETRQITKHVAQILDSRFNTEYDENNKLIREVKIITLKSKLVSDFRKDFQFYKVREINDYHHAHDAYLNAVVGTALIKKYPKLESEFVYGDYKVYDVRKMIRKSEQEIGKATAKYFFYSNIMNFFKSEITLANGEIIKRPLIETNEETGEIVWDKGKDFATVRKVLSMPQVNIVKKTEVQTGGFSKESILPKRNSDKLIARKKDWDPKKYGGFDSPTVAYSVLVIAKVEKGKTKKLKTVKELVGITIMERSSFEKNPIAFLEKKGYQEVQKHLIIKLPKYSLFELENGRKRLLASAGELQKGNELALPSKYVTLLYLASNYEKLKGKSEDNEKKKEYVEQHREEFDEIFNQIIEFSERYILADKNLSKIKELFNKNEDSDITELAENFIHLFTFTSLGAPAAFKFFDKTIDRKRYTSTKECLDATLIHQSITGLYETRIDLSQLGGD

SEQ ID NO: 102 - protein, 1368 aa, synthetic construct
MDKKYSIGLDIGTNSVGWAVITDEYKVPSKKFKVLGNTDRHSIKKNLIGALLFDSGETAEATRLKRTARRRYTRRKNRIRYLQEIFSSEMAKVDDSFFHRLEESFLVEEDKKHERHPIFGNIVDEVAYHEKYPTIYHLRKKLADSTEKADLRLIYLALAHMIKFRGHFLIEGDLNPDNSDVDKLFIQLVQTYNQLFEENPINESGVDAKAILSARLSKSRRLENLIAQLPGQKKNGLFGNLIALSLGLTPNFKSNFDLAEDAKLQLSKDTYDEDLDNLLAQIGDQYADLFLAAKNLSDAILLSDILTVNDEITKAPLSASMIKRYDEHHQDLTLLKALVRQQLPEKYKEIFFDQSKNGYAGYIDGGASQEEFYKYIKPILEKMDGTEELLAKLNREDLLRKQRTFDNGSIPHQIHLGELHAILRRQEDFYPFLKDNREKIEKILTFRIPYYVGPLARGNSRFAWMTRKSEETITPWNFEEVVDKGASAQAFIERMTNFDKNLPNEKVLPKHSLLYEYFTVYNELTKVKYVTEGMRKPEFLSAEQKEAIVDLLFKKNRKVTVKQLKDDYFKKIECFDSVEISGVEDRFNASLGTYHDLLKIIKDKDFLDNEENEDILEDIVLTLTLFEDREMIEERLKKYAHLFDKKVLKQLKRRRYTGWGRLSRKLINGIRDKQSGKTILDFLKSDGFANRNFMQLIHDDSLTFKEEIQKAQVSGQGDSLHEQIANLAGSPAIKKGILQSVKIVDELVKVMGRHKPENIVIEMARENQTTQKGQKNSRERMKRIEEGIKELGSQILKEHPVENTQLQNEKLYLYYLQNGRDMYVDQELDINRLSDYDVDHIVPQSFLKDDSIDNKVLTRSDKARGKSDNVPSEEVVKKMKNYWRQLLNAKLITQRKFDNLTKAERGGLSELDKAGFIKRQLVETRQITKHVAQILDSRMNTERDENDKLIREVKIITLKSKLVSDFRKDFQFYKVREINDYHHAHDAYLNAVVGTALIKKYPKLESEFVYGDYKVYDVRKMIAKSEQEIGKATAKYFFYSNIMNFFKTEITLANGEIRKRPVIETNEETGEIVWDKEKDFATVRKVLSMPQVNIVKKTEVQTGGFSKESILPKRNSDKLIARKKDWDTKKYGGFDSPTVAYSVLVVAKVEKGKSKKLKSVKELVGITIMERSSFEKDPVAFLEAKGYKDVQKDLIIKLPKYSLFELENGRKRMLASAGELQKGNELALPSKYVTFLYLASHYEKLKGKPEDNEQKQEYVEQHRHYFDEIFEQIIEFSERYILADKNLDKILSLYSKFRDKSIREQAENFIHLFTLTSLGAPAAFKFFDTTIDRKRYTSTKEILDATLIHQSITGLYETRIDLSQLGGD

SEQ ID NO: 103 - protein, 1368 aa, synthetic construct
MDKKYSIGLDIGTNSVGWAVITDEYKVPSKKFKVLGNTDRHSIKKNLIGALLFDSGETAEATRLKRTARRRYTRRKNRICYLQEIFSNEMAKVDDSFFHRLEESFLVEEDKRNERHPIFGNIVDEVAYHEKYPTIYHLRKKLADSDEKADLRLVYLALAHMIKFRGHFLIEGDLNSENSDVQKLFIQLVQTYNQLFEENPLNEEGVDAEAILSERLSKSRRLENLIAQFPGEKKNGLFGNLIALSLGLTPNFKSNFDLAEDAKLQLSKDTYDEDLENLLAQIGDQYADLFLAAKNLSDAILLSDILTVNDESTKAPLSASMVKRYDEHHQDLKLLKALVRQQLPEKYKEIFSDKSKNGYAGYIDGKTSQEEFYKYIKPILEKMDGSEEFLEKINREDFLRKQRTFDNGSIPHQIHLQELHAILRRQEKYYPFLKENREKIEKILTFRIPYYVGPLARGNSRFAWMTRKSDEKITPWNFDEVVDKEASAEKFIERMTNFDTYLPEEKVLPKHSLLYEKFTVYNELTKVKYVTEGMRKPEFFSGEQKQEIFDLLFKKNRKVTVKKLKEDYFKKFECFDIVEISGLEDRFNASLGTYHDLLKIIKDKDFLDNEENEDILEDIVLTLTLFEDREMIEKRLKKYADLFDDKVLKQLKRRHYTGWGRLSKKLINGIRDKQSGKTILDFLISDGFANRNFMQLIHDDSLTFKEEIEKAQVSGQGDSLHEHIANLAGSPAIKKGILQTVKVVDELVKVMGRHKPENIVIEMARENQTTQKGQRNSRERLKRIEEAIKELGSKILKEHPVENTQLQNDRLYLYYLQNGKDMYTGEELDIDRLSQYDIDHIIPQSFIKDDSIDNKVLVSSAKARGKSDNVPSEEVVKKMKNYWRQLLDAKLISQRKFDNLTKAERGGLSELDKAGFIKRQLVETRQITKHVAQILDSRMNTKYDENDKLIREVKVITLKSKLVSDFRKDFQFYKVREINNYHHAHDAYLNAVVGTALIKKYPKLESEFVYGDYKVYDVRKMIAKSEQEIGKATAKYFFYSNIMNFFKTEITLANGEIRKRPLIETNGETGEIVWDKGRDFATVRKVLSMPQVNIVKKTEVQTGGFSKESILPKRNSDKLIARKKDWDPKKYGGFDSPTVAYSVLVVAKVEKGKSKKLKSVKELLGITIMERSSFEKNPIDFLEAKGYKEVKKDLIIKLPKYSLFELENGRKRMLASAGELQKGNELALPSKYVNFLYLASHYEKLKGSPEDNEQKQLFVEQHKHYLDEIIEQISEFSKRVILADANLDKVLSAYNKHRDKPIREQAENIIHLFTLTNLGAPAAFKYFDTTIDRKRYTSTKEVLDATLIHQSITGLYETRIDLSQLGGD

SEQ ID NO: 104 - protein, 1368 aa, synthetic construct
MDKKYSIGLDIGTNSVGWAVITDEYKVPSKKFKVLGNTDRHSIKKNLIGALLFDSGETAEATRLKRTARRRYTRRKNRICYLQEIFSNEMAKVDDSFFHRLEESFLVEEDKRNDRHPIFGNIVEEVAYHEKYPTIYHLRKHLADSPEKADLRLVYLALAHIIKFRGHFLIEGDLDAENTDVQKLFKQLVEAYNQTFEESHLEIETVDAKSILTEKLSKSRRLENLIAKFPGEKKNGLFGNLIALSLGLTPNFKSNFDLSEDAKLQFSKDTYDEDLEELLGQIGDDYADLFDAAKNLYDAILLSGILTVDDNSTKAPLSASMVKRYDEHHQDLTLLKEFVREKLPEKYKEIFFDQSKNGYAGYIDGGASQEDFYKYLKKLLEKIDGSEEFLDKIDREDFLRKQRTFDNGSIPHQIHLQELKAIIRRQEEYYPFLKENKEKIEKILTFRIPYYVGPLARGNSRFAWMERKSDETITPWNFDDIVDKEKSAEKFIERMTNFDKNLPEEKVLPKHSLLYEKFTVYNELTKVKYVTEGGKKPKFFDANQKQEIVDNLFKKYRKVTKKQLLEYLAKEFDEFRIVDISGVEDRFNASLGTYHDLKKILGDKSFLDDDKNEEILEDIILTLTLFEDREMIKKRLEKYSDLFDKKQIKKLSRRRYTGWGRLSKKLINGIRDKQSGKTILDYLIDDGYANRNFMQLIHDDSLSFKEEIEKAQVIGDGDSLHEHIANLAGSPAIKKGILQTVKVVDELVKVMGRHKPENIVIEMARENQTTQKGQKNSRERMKRIEEGIKELGSQILKEHPVENTQLQNEKLYLYYLQNGRDMYVDQELDINRLSDYDVDHIVPQSFLKDDSIDNKVLTRSDKARGKSDNVPSEEVVKKMKNYWRQLLNAKLITQRKFDNLTKAERGGLSELDKAGFIKRQLVETRQITKHVAQILDSRMNTKYDENDKLIREVKVITLKSKLVSDFRKDFQFYKVREINNYHHAHDAYLNAVVGTALIKKYPKLESEFVYGDYKVYDVRKMIAKSEQEIGKATAKYFFYSNIMNFFKTEITLANGEIRKRPLIETNGETGEIVWDKGRDFATVRKVLSMPQVNIVKKTEVQTGGFSKESILPKRNSDKLIARKKDWDPKKYGGFDSPTVAYSVLVVAKVEKGKSKKLKSVKELLGITIMERSSFEKNPIDFLEAKGYKEVKKDLIIKLPKYSLFELENGRKRMLASAGELQKGNELALPSKYVNFLYLASHYEKLKGSPEDNEQKQLFVEQHKHYLDEIIEQISEFSKRVILADANLDKVLSAYNKHRDKPIREQAENIIHLFTLTNLGAPAAFKYFDTTIDRKRYTSTKEVLDATLIHQSITGLYETRIDLSQLGGD

SEQ ID NO: 105 - protein, 1368 aa, synthetic construct
MDKKYSIGLDIGTNSVGWAVITDEYKVPSKKFKVLGNTDRHSIKKNLIGALLFDSGETAEATRLKRTARRRYTRRKNRIRYLQEIFSEEMAKVDDSFFHRLEESFLVEEDKKNERHPIFGNIVDEVAYHEKYPTIYHLRKKLVDSDEKADLRLIYLALAHMIKFRGHFLIEGDLNSDNSDVQKLFEQLVQTYNQLFEENPIEAEGVDAKAILSEKLSKSRRLENLIAQLPGEKKNGLFGNLIALSLGLTPNFKSNFDLAEDAKLQLSKDTYDDDLENLLAQIGDQYADLFLAAKNLSDAILLSDILRVNTEITKAPLSASMIKRYDEHHQDLTLLKALVRQQLPEKYKEIFFDQSKNGYAGYIDGGASQEEFYKYIKPILEKMDGTEELLAKLNREDLLRKQRTFDNGSIPHQIHLGELHAILRRQEKYYPFLKENREKIEKILTFRIPYYVGPLARGNSRFAWMTRKSDETITPWNFEEVVDKGASAQKFIERMTNFDKNLPNEKVLPKHSLLYEYFTVYNELTKVKYVTEGMRKPEFLDGEQKKEIVDLLFKKNRKVTVKQLKEDYFKKFECFDSVEISGVEDRFNASLGTYHDLLKIIKDKDFLDNEENEDILEDIVLTLTLFEDREMIKERLEKYANLFDKKVMKQLKRRRYTGWGRLSKKLINGIRDKQSGKTILDFLKADGFANRNFMQLIHDDSLTFKDEIEKAQVIGKGDSLHEHIANLAGSPAIKKGILQTVKVVDELVKVMGRHKPENIVIEMARENQTTQKGQKNSRERMKRIEEGIKELGSQILKEHPVENTQLQNEKLYLYYLQNGRDMYVDQELDINRLSDYDVDHIVPQSFLKDDSIDNKVLTRSDKARGKSDNVPSEEVVKKMKNYWRQLLNAKLITQRKFDNLTKAERGGLSELDKAGFIKRQLVETRQITKHVAQILDSRMNTEYDENDKLIRDVKVITLKSKLVSDFRKDFGFYKVREINNYHHAHDAYLNAVVGTALIKKYPKLESEFVYGDYKVYDVRKMIAKSEQEIGKATAKYFFYSNIMNFFKTEITLANGEIRKRPLIETNEETGEIVWDKEKDFATVRKVLSMPQVNIVKKTEVQTGGFSKESILPKRNSDKLIARKKDWDPKKYGGFDSPTVAYSVLVVAKVEKGKAKKLKTVKELLGITIMERSSFEKNPVAFLEAKGYQEVKKDLIIKLPKYSLFELENGRKRMLASAGELQKGNELALPSKYVNFLYLASHYEKLKGSPEDNEQKQLFVEQHKEYLDEIIEQISEFSKRVILADANLEKVKSAYEKHEDKSIEEQAENIIHLFTLTNLGAPAAFKYFDTTIDRKRYTSTKEVLNATLIHQSITGLYETRIDLSQLGGD

SEQ ID NO: 106 - protein, 1368 aa, synthetic construct
MDKKYSIGLDIGTNSVGWAVITDEYKVPSKKFKVLGNTDRHSIKKNLIGALLFDSGETAEATRLKRTARRRYTRRKNRIRYLQEIFSEEMAKVDDSFFHRLEESFLVEEDKKHERHPIFGNIVDEVAYHEKYPTIYHLRKKLADSTEKADLRLIYLALAHMIKFRGHFLIEGDLNPENSDVDKLFIQLVQTYNQLFEENPINESGVDAKAILTAKLSKSRRLENLIAQLPGEKKNGLFGNLIALSLGLTPNFKSNFDLAEDAKLQLSKDTYDEDLDNLLAQIGDQYADLFLAAKNLSDAILLSDILTVNDEITKAPLSASMIKRYDEHHQDLTLLKALVRQQLPEKYKEIFFDPSKNGYAGYIDGGASQEEFYKFIKPILEKMDGTEELLAKLNREDFLRKQRTFDNGSIPHQIHLGELHAILRRQEDFYPFLKENREKIEKILTFRIPYYVGPLARGNSRFAWMTRKSEETITPWNFEEVVDKGASAQAFIERMTNFDKNLPNEKVLPKHSLLYEYFTVYNELTKVKYVTEGMRKPEFLSGEQKEEIVDLLFKTNRKVTVKQLKEDYFKKIECFDSVEISGVEDRFNASLGTYHDLLKIIKDKDFLDNEENEDILEDIVLTLTLFEDREMIEERLEKYAHLFDKKVLKQLKRRRYTGWGRLSRKLINGIRDKQSGKTILDFLKSDGFANRNFMQLIHDDSLTFKEEIQKAQVIGQGDSLHEQIANLAGSPAIKKGILQTVKIVDELVKVMGRHKPENIVIEMARENQTTQKGQKNSRERMKRIEEGIKELGSQILKEHPVENTQLQNEKLYLYYLQNGRDMYVDQELDINRLSDYDVDHIVPQSFLKDDSIDNKVLTRSDKARGKSDNVPSEEVVKKMKNYWRQLLNAKLITQRKFDNLTKAERGGLSELDKAGFIKRQLVETRQITKHVAQILDSRMNTERDENDKLIREVKIITLKSKLVSDFRKDFQFYKVREINNYHHAHDAYLNAVVGTALIKKYPKLESEFVYGDYKVYDVRKMIAKSEQEIGKATAKYFFYSNIMNFFKSEITLANGTIRKRPLIETNEETGEIVWDKGKDFATVRKVLSMPQVNIVKKTEVQTGGFSKESILPKRNSDKLIARKKDWDTKKYGGFDSPTVAYSVLVVAKVEKGKSKKLKTVKELVGITIMERSSFEKDPVAFLEAKGYKEVQKDLIIKLPKYSLFELENGRKRLLASAGELQKGNELALPGKYVTLLYLASNYEKLKGKPEDNEQKLEYVEQHRHYFDEIVDQISEFSERYILADANLSKILSLYNEHRDKPIREQAENFIHLFTFTSLGAPAAFKFFDTTIDRKRYTSTSEILNATLIHQSITGLYETRIDLSQLGGD

SEQ ID NO: 107 - protein, 1368 aa, synthetic construct
MDKKYSIGLDIGTNSVGWAVITDEYKVPSKKFKVLGNTDRHSIKKNLIGALLFDSGETAEATRLKRTARRRYTRRKNRICYLQEIFSNEMAKVDPSFFQRLEESFLVEEDKTGSRHPIFGNIVEEVAYHEKYPTIYHLRKKLVDSDEKADLRLIYLALAHMIKFRGHFLIEGDLNPDNSDVDKLFIQLVQTYNQLFEENPINASGVDAKAILSARLSKSRRLENLIAQLPGEKKNGLFGNLIALSLGLTPNFKSNFDLAEDAKLQLSKDTYDDDLDNLLAQIGDQYADLFLAAKNLSDAILLSDILRVDTNDTRAPLSASMIKRYDDHHQDLTKLKELVRKYLPEKYKEIFFDQNSNGYAGYIDGGATQEEFYKYIKPILESMPGTKDLLKKLENKDLLRKQRTFDNGSIPHQIHLGELRAILERQEKFYPFLKENREKIEKILSFRIPYYVGPLARGNSRFAWMTRKSEETITPWNFEEVVDKGASAQSFIERMTNFDKNLPNEKVLPKHSLLYEYFTVYNELTKVKYVTEGMRKPAFLSGEQKKAIVDLLFKTNRKVTVKQLKEDYFKKIECFDSVEISGVEDRFNASLGTYHDLLKIIKDKDFLDNEENEDILEDIVLTLTLFEDREMIEERLKTYAHLFDDKVMKQLKRRRYTGWGRLSRKLINGIRDKQSGKTILDFLKSDGFANRNFMQLIHDDSLTFKEDIQKAQVSGQGDSLHEHIANLAGSPAIKKGILQTVKVVDELVKVMGRHKPENIVIEMARENQTTQKGQKNSRERMKRIEEGIKELGSQILKEHPVENTQLQNEKLYLYYLQNGRDMYVDQELDINRLSDYDVDHIVPQSFLKDDSIDNKVLTRSDKARGKSDNVPSEEVVKKMKNYWRQLLNAKLITQRKFDNLTKAERGGLSELDKAGFIKRQLVETRQITKHVAQILDSRMNTKYDENDKLIREVKVITLKSKLVSDFRKDFQFYKVREINNYHHAHDAYLNAVVGTALIKKYPKLESEFVYGDYKVYDVRKMIAKSEQEIGKATAKYFFYSNIMNFFKTEITLANGEIRKRPLIETNGETGEIVWDKGRDFATVRKVLSMPQVNIVKKTEVQTGGFSKESILPKRDSDKLIARKKDWDPKKYGGFDSPTVAYSVLVVAKKEKGKKKKLVKVKELLGITIMERSKFEKDPLGFLESKGYKDVKEDEIIKLPKYSLFELGNGRKRMLASAGELQKGNELALPSEYVNFLYLASNYEKLKGDPKKQEEKQKYVEKNKEYLDKIIEQISEFSRRVIKADANLEKVLKAYEKHKDKPISEQAENIIHLFTLTALGAPAAFKYFDEVIDRKRYTSTKEVLDATLIHQSITGLYETRIDLSFLGGD

SEQ ID NO: 108 - protein, 1368 aa, synthetic construct
MDKKYSIGLDIGTNSVGWAVITDEYKVPSKKFKVLGNTDRHSIKKNLIGALLFDSGETAEATRLKRTARRRYTRRKNRICYLQEIFSNEMAKVDDSFFHRLEESFLVEEDKKHERHPIFGNIVDEVAYHEKYPTIYHLRKKLADSTEKADLRLIYLALAHIIKFRGHFLIEGDLNSDNSDVQKLFIQLVQTYNQLFEENPINEEGVDAKAILSAKLSKSRRLENLIAQLPGEKKNGLFGNLIALSLGLTPNFKSNFDLAEDAKLQLSKDTYDEDLDNLLAQIGDQYADLFLAAKNLSDAILLSDILTVNSEITKAPLSASMIKRYDEHHQDLTLLKALVRQQLPEKYKEIFFDESKNGYAGYIDGGASQEEFYKYIKPILEKMDGTEYLLAKLNREDFLRKQRTFDNGSIPHQIHLGELHAILRRQEDFYPFLKENREKIEKILTFRIPYYVGPLARGNSRFAWMTRKSDETITPWNFEEVVDKEASAQAFIERMTNFDKNLPNEKVLPKHSLLYEYFTVYNELTKVKYVTEGMGKPEFLSAEQKQEIVDLLFKKNRKVTVKQLKEFLFKEIECFDSVEISGVEDAFNASLGTYHDLLKIIKDKDFLDNEENEDILEDIILTLTLFEDREMIEERLKKYANLFDKKVLKQLKRRRYTGWGRLSKKLINGIRDKQSGKTILDFLKSDGFANRNFMQLIHDDSLTFKEEIQKAQVSGQGDSLHEHIANLAGSPAIKKGILQTVKVVDELVKVMGRHKPENIVIEMARENQTTQKGQKNSRERMKRIEEGIKELGSQILKEHPVENTQLQNEKLYLYYLQNGRDMYVDQELDINRLSDYDVDHIVPQSFLKDDSIDNKVLTRSDKARGKSDNVPSEEVVKKMKNYWRQLLNAKLITQRKFDNLTKAERGGLSELDKAGFIKRQLVETRQITKHVAQILDSRMNTKYDENDKLIREVKVITLKSKLVSDFRKDFQFYKVREINNYHHAHDAYLNAVVGTALIKKYPKLESEFVYGDYKVYDVRKMIAKSEQEIGKATAKYFFYSNIMNFFKTEITLANGEIRKRPLIETNGETGEIVWDKGRDFATVRKVLSMPQVNIVKKTEVQTGGFSKESILPKRNSDKLIARKKDWDTKKYGGFDSPTVAYSVLVVAKVEKGKSKKLKTVKELVGITIMERSSFEKDPIAFLEAKGYKNIQEDLIIKLPKYSLFELENGRKRLLASAGELQKGNELALPQKYVTFLYLASHYEKLKGKPEDEEQKQLYVEQHRHYFDEILEQISEFSERYILADKNLEKIKELYNKFEDYSISELAESFINLFTLTALGAPAAFKFFDTTIDRKRYTSTKEILNATLIHQSITGLYETRIDLSQLGGD

SEQ ID NO: 109 - protein, 1368 aa, synthetic construct
MDKSYSIGLDIGTNSVGWAVITDEYKVPSKKFKVLGNTDRHSIKKNLLGALLFDSGETAEATRLKRTARRRYTRRKNRIRYLQEIFAEEMAKVDDSFFHRLEESFLVEEDKRHERHPIFGNIVDEVAYHENYPTIYHLRKHLADSTEKADLRLIYLALAHIIKFRGHFLIEGDLNAENTDVQKLFIQLVQTYNQLFEESPINEEGVDAKAILTAKLSKSRRLENLIKQIPGEKKNGLFGNLIALSLGLTPNFKSNFDLAEDAKLQLSKDTYDEDLDNLLAQIGDQYADLFLAAKNLSDAILLSDILTVNTEITKAPLSASMIKRYDEHHQDLTLLKKLVREQLPEKYKEIFFDESKNGYAGYIDGGASQEDFYKYIKPILEKLDGTEEFLAKINREDFLRKQRTFDNGSIPHQIHLGELHAILRRQEDFYPFLKENKEKIEKILTFRIPYYVGPLARGNSRFAWLTRKSDETITPWNFEEVVDKEASAQAFIERMTNFDKNLPEEKVLPKHSLLYEYFTVYNELTKVKYITEGMRKPAFLSSEQKKEIVDLLFKKNRKVTVKQLKEFYFKKIECFDSVEISGVEDRFNASLGTYHDLLKIIKDKDFLDNEENEDILEDIVLTLTLFEDREMIEKRLSKYADLFDKKVLKQLKRRRYTGWGRLSAKLINGIRDKQSGKTILDFLKDDGFANRNFMQLIHDDSLTFKEEIQKAQVIGQGDSLHEQIANLAGSPAIKKGILQSIKIVDELVKVMGRHKPENIVIEMARENQTTQKGQKNSRERLKRLEEGIKKLGSQILKEHPVENTQLQNDKLYLYYLQNGKDMYTGEELDIDRLSDYDVDHIIPQSFIKDDSIDNKVLTSSAKARGKSDNVPSEEVVKKMKSYWRQLLNAKLISQRKFDNLTKAERGGLSELDKAGFIKRQLVETRQITKHVAQILDSRFNTKYDENDKLIREVKIITLKSKLVSDFRKDFGFYKVREINDYHHAHDAYLNAVVGTALIKKYPKLESEFVYGDYKVYDSRKMIAKSEQEIGKATAKYFFYSNIMNFFKTEITLANGEIRKRPLIETNEETGEIVWDKEKDFATVRKVLSMPQVNIVKKTEVQTGGFSKESILPKRNSDKLIARKKDWDTKKYGGFDSPTVAYSVLVVADVEKGKSKKLKTVKELVGITIMERSSFEKNPIAFLEAKGYKNIQKDLIIKLPKYSLFELENGRKRLLASAGELQKGNELALPQKYVTLLYHAKHYEKLKESPEDNEKHLEYVEQHRHEFDEIFDQISEFSERYILADKNLEKIKELYNKNEDKDISELAESFINLFTFTALGAPAAFKFFDTTIDRKRYTSTTEILNATLIHQSITGLYETRIDLSQLGGD

SEQ ID NO: 110 - protein, 1368 aa, synthetic construct
MKKKYSIGLDIGTNSVGWAVITDEYKVPSKKFKVLGNTDRQSIKKNLLGALLFDSGETAEATRLKRTARRRYTRRKNRIRYLQEIFAEEMAKVDDSFFHRLEESFLVEEDKRHERHPIFGNIVDEVAYHENYPTIYHLRKKLADSTEKADLRLIYLALAHIIKFRGHFLIEGDLNPENTDVQKLFIQLVQTYNQLFEENPLSEEGVDAKAILTAKLSKSRRLENLIAQIPGEKKNGLFGNLIALSLGLTPNFKSNFDLAEDAKLQLSKDTYDEDLDNLLAQIGDQYADLFLAAKNLSDAILLSDILTVNSEITKAPLSASMIKRYDEHHQDLTLLKALVRQQLPEKYKEIFFDQTKNGYAGYIDGGASQEEFYKFIKPILEKLDGSEELLAKINREDFLRKQRTFDNGSIPHQIHLGELHAILRRQEDFYPFLKENREKIEKILTFRIPYYVGPLARGNSRFAWLTRKSDETITPWNFEEVVDKEASAQAFIERMTNFDKNLPNEKVLPKHSLLYEYFTVYNELTKVKYVTEGMRKPEFLSAEQKEEIVDLLFKTNRKVTVKQLKEDLFKKIECFDSVEISGVEDRFNASLGTYHDLLKIIKDKDFLDNEENEDILEDIVLTLTLFEDREMIENRLEKYADLFDKKVLKQLKRRRYTGWGRLSRKLINGIRDKQSGKTILDFLKDDGFANRNFMQLIHDDSLTFKEEIKKAQVIGQGDSLHEQIANLAGSPAIKKGILQSVKIVDELVKVMGRHKPENIVIEMARENQTTQKGQKNSRERMKRIEEGIKELGSQILKEHPVENTQLQNEKLYLYYLQNGRDMYVDQELDINRLSDYDVDHIVPQSFLKDDSIDNKVLTRSDKARGKSDNVPSEEVVKKMKNYWRQLLNAKLITQRKFDNLTKAERGGLSELDKAGFIKRQLVETRQITKHVAQILDSRFNTERDENDKLIREVKIITLKSKLVSDFRKDFQFYKVREINNYHHAHDAYLNAVVGTALIKKYPKLESEFVYGDYKVYDVRKMIAKSEQEIGKATAKYFFYSNIMNFFKTEITLANGEIRKRPLIETNEETGEIVWDKEKDFATVRKVLSMPQVNIVKKTEVQTGGFSKESILPKRNSDKLIARKKDWDTKKYGGFDSPTVAYSVLVVAKIEKGKAKKLKTVKELVGITIMERSSFEKDPVAFLEAKGYKNIQKDLIIKLPKYSLFELENGRKRLLASAGELQKGNELALPQKYVTLLYLASHYEKLKGKPEDLEKKLEYVEQHRDEFDEIFEQISEFSERYILADKNLEKIKELYKEFRDKSIEELAENFIHLFTFTALGAPAAFKFFDKTIDRKRYTSTTEILNATLIHQSITGLYETRIDLSKLGGD

SEQ ID NO: 111 - protein, 1368 aa, synthetic construct
MDKKYSIGLDIGTNSVGWAVITDEYKVPSKKFKVLGNTDRQSIKKNLIGALLFDSGETAEATRLKRTARRRYTRRKNRIRYLQEIFAEEMAKVDDSFFHRLEESFLVEEDKKHERHPIFGNIVDEVAYHEKYPTIYHLRKKLADSTEKADLRLIYLALAHMIKFRGHFLIEGDLNSDNSDVDKLFIQLVQTYNQLFEENPINESGVDAKAILSARLSKSRRLENLIAQLPGEKKNGLFGNLIALSLGLTPNFKSNFDLAEDAKLQLSKDTYDDDLENLLAQIGDQYADLFLAAKNLSDAILLSDILTVNSEITKAPLSASMIKRYDEHHQDLTLLKALVRQQLPEKYKEIFFDQSKNGYAGYIDGGASQEEFYKFIKPILEKMDGTEELLAKLNREDFLRKQRTFDNGSIPHQIHLGELHAILRRQEDFYPFLKENREKIEKILTFRIPYYVGPLARGNSRFAWMTRKSEETITPWNFEEVVDKGASAQAFIERMTNFDKNLPNEKVLPKHSLLYEYFTVYNELTKVKYVTEGMRKPEFLSGEQKKAIVDLLFKKNRKVTVKQLKEDYFKKIECFDSVEISGVEDRFNASLGTYHDLLKIIKDKDFLDNEENEDILEDIVLTLTLFEDREMIEERLKKYANLFDDKVLKQLKRRRYTGWGRLSRKLINGIRDKQSGKTILDFLKSDGFANRNFMQLIHDDSLTFKEAIQKAQVSGQGDSLHEQIANLAGSPAIKKGILQTVKIVDELVKVMGRHKPENIVIEMARENQTTQKGQKNSRERMKRIEEGLKELGSQILKEHPVENTQLQNEKLYLYYLQNGKDMYTGQELDIDRLSDYDVDHIIPQSFIKDDSIDNKVLTSSKEARGKSDNVPSEEVVKKMKNYWRQLLKAKLISQRKFDNLTKAERGGLTELDKAGFIKRQLVETRQITKHVAQILDSRMNTEYDENDKLIRKVKIITLKSKLVSDFRKDFQFYKVREINNYHHAHDAYLNAVVGTALIKKYPKLESEFVYGDYKVYDVRKMIAKSEQEIGKATAKRFFYSNIMNFFKTEIKLANGEIRKRPLIETNEETGEIVWDKEKDFATVRKVLSMPQVNIVKKTEVQTGGFSKESILPKRNSDKLIARKKDWDPKKYGGFDSPTVAYSVLVVAKVEKGKSKKLKSVKELVGITIMERSSFEKDPVDFLEAKGYKEIQKDLIIKLPKYSLFELENGRKRMLASAGELQKGNELALPSKYVKFLYLASHYEKLKGSPEDNEQKQLYVEQHKHYFDEIVDQISEFSERYILADANLDKILSAYNKHRDKSIREQAENIINLFTLTNLGAPAAFKFFDTTIDRKRYTSTKEILDATLIHQSITGLYETRIDLSQLGGD

SEQ ID NO: 112 - protein, 1368 aa, synthetic construct
MDKKYSIGLDIGTNSVGWAVITDEYKVPSKKFKVLGNTDRHSIKKNLIGALLFDSGETAEATRLKRTARRRYTRRKNRIRYLQEIFSEEMAKVDDSFFHRLEESFLVEEDKRNERHPIFGNIVDEVAYHEKYPTIYHLRKKLADSDEKADLRLIYLALAHMIKFRGHFLIEGDLNSDNSDVDKLFIQLVQTYNQLFEENPINEEGVDAKAILSEKLSKSRRLENLIAQFPGEKKNGLFGNLIALSLGLTPNFKSNFDLAEDAKLQLSKDTYDDDLENLLAQIGDQYADLFLAAKNLSDAILLSDILTVNDEITKAPLSASMVKRYDEHHQDLTLLKKLVRQQLPEKYKEIFFDQSKNGYAGYIDGGASQEEFYKYLKPILEKMDGTEELLDKIEREDFLRKQRTFDNGSIPHQIHLGELHAILRRQEKYYPFLKDNREKIEKILTFRIPYYVGPLARGNSRFAWMTRKSDETITPWNFEEVVDKGASAQSFIERMTNFDKNLPNEKVLPKHSLLYEKFTVYNELTKVKYVTEGMRKPAFLSAEQKQEIVDLLFKKNRKVTVKQLKEDYFKKFECFDSVEISGVEDRFNASLGTYHDLLKIIKDKDFLDNEENEDILEDIVLTLTLFEDREMIEKRLKKYANLFDDKVLKKLKRRRYTGWGRLSKKLINGIRDKQSGKTILDFLKSDGFANRNFMQLIHDDSLTFKEEIQKAQVSGQGESLHELIANLAGSPAIKKGILQTLKIVDELVKVMGRHKPENIVIEMARENQTTQKGQKNSRERMKRIEEGIKELGSQILKEHPVENTQLQNEKLYLYYLQNGRDMYVDQELDINRLSDYDVDHIVPQSFLKDDSIDNKVLTRSDKARGKSDNVPSEEVVKKMKNYWRQLLNAKLITQRKFDNLTKAERGGLSELDKAGFIKRQLVETRQITKHVAQILDSRFNTKYDENDKLIRDVKIITLKSKLVSDFRKDFQFYKVREINNYHHAHDAYLNAVVGTALIKKYPKLESEFVYGDYKVYDVRKMIAKSEQEIGKATAKYFFYSNIMNFFKTEITLANGEIRKRPLIETNEETGEIVWDKEKDFATVRKVLSMPQVNIVKKTEVQTGGFSKESILPKRNSDKLIARKKDWDPKKYGGFDSPTVAYSVLVIAKVEKGKAKKLKTVKELVGITIMERSSFEKNPIAFLEDKGYKEVKKDLIIKLPKYSLFELENGRKRLLASAGELQKGNELALPSKYVTLLYLASHYEKLKGSPEDNEQKQLFVEQHKHYFDEILDQISEFSKRVILADANLEKIKSLYDKNRDASIEEQAENFIHLFTFTNLGAPAAFKFFDTTIDRKRYTSTKEILNATLIHQSITGLYETRIDLSQLGGD

SEQ ID NO: 113 - protein, 1368 aa, synthetic construct
MDKKYSIGLDIGTNSVGWAVITDEYKVPSKKFKVLGNTDRHSIKKNLIGALLFDSGETAEATRLKRTARRRYTRRKNRICYLQEIFSNEMAKVDENFFQRLEESFLVEEDKRGERHPIFGNIVEEVAYHEKYPTIYHLRKHLADSDEKADLRLVYLALAHIIKFRGHFLIEGDLDAENTDVQKLFKQLVETYDRTFEESPLEEFTVDAESILTEKLSKSRRLENLIAQFPGEKKNGLFGNFIALSLGLTPNFKSNFDLSEDAKLQFSKDTYDEDLEELLGQIGDDYADLFLAAKNLYDAILLSGILTVDDNSTKAPLSASMVKRYDEHHQDLTELKAFIRKQLPEKYKEIFFDQSKNGYAGYIDGGASQEEFYKYLKKILEKIDGSEEFLDKIEREDFLRKQRTFDNGSIPHQIHLQELHAIIRRQEEYYPFLKENQEKIEKILTFRIPYYVGPLARGNSRFAWLSRKSDETITPWNFDDVVDKEKSAEDFIERMTNFDKNLPEEKVLPKHSLLYEKFTVYNELTKVKYVTEGGRKPKFFDANMKQEIFDELFKKYRKVTKKQLLDYLVKEFEEFRIVDISGVEDRFNASLGTYHDLKKILGDKDFLDNDENEEILEDIVLTLTLFEDREMIKKRLEKYSDLFDKKQLKKLCRRRYTGWGRLSAKLINGIRDKETGKTILDYLIDDGEANRNFMQLIHDDNLSFKEEIEKAQVIGDEDSLHEHIANLAGSPAIKKGILQTVKVVDELVKVMGRHKPENIVIEMARENQTTQKGQKNSRERMKRIEEGIKELGSQILKEHPVENTQLQNEKLYLYYLQNGRDMYVDQELDINRLSDYDVDHIVPQSFLKDDSIDNKVLTRSDKARGKSDNVPSEEVVKKMKNYWRQLLNAKLITQRKFDNLTKAERGGLSELDKAGFIKRQLVETRQITKHVAQILDSRMNTKYDENDKLIREVKVITLKSKLVSDFRKDFQFYKVREINNYHHAHDAYLNAVVGTALIKKYPKLESEFVYGDYKVYDVRKMIAKSEQEIGKATAKYFFYSNIMNFFKTEITLANGEIRKRPLIETNGETGEIVWDKGRDFATVRKVLSMPQVNIVKKTEVQTGGFSKESILPKRNSDKLIARKKDWDPKKYGGFDSPTVAYSVLVVAKVEKGKSKKLKSVKELLGITIMERSSFEKNPIDFLEAKGYKEVKKDLIIKLPKYSLFELENGRKRMLASAGELQKGNELALPSKYVNFLYLASHYEKLKGSPEDNEQKQLFVEQHKHYLDEIIEQISEFSKRVILADANLDKVLSAYNKHRDKPIREQAENIIHLFTLTNLGAPAAFKYFDTTIDRKRYTSTKEVLDATLIHQSITGLYETRIDLSQLGGD

SEQ ID NO: 114 - protein, 1368 aa, synthetic construct
MDKKYSIGLDIGTNSVGWAVITDEYKVPSKKFKVLGNTDRHSIKKNLIGALLFDSGETAEATRLKRTARRRYTRRKNRICYLQEIFSNEMAKVDDSFFHRLEESFLVEEDKKHERHPIFGNIVDEVAYHEKYPTIYHLRKKLVDSTDKADLRLIYLALAHMIKFRGHFLIEGDLNPDNSDVQKLFKQLVQTYNQLFEEKPLDEETVDAKAILSARLSKSRRLENLIAQFPGEKKNGLFGNLIALSLGLTPNFKSNFDLAEDAKLQLSKDTYDEDLENLLGQIGDQYADLFVAAKNLSDAILLSGILTVNTEITKAPLSASMIKRYDEHHQDLTLLKALVRQQLPEKYKEIFFDQSKNGYAGYIDGGASQEEFYKFIKPILEKMDGTEELLVKLNREDLLRKQRTFDNGSIPHQIHLGELHAILRRQEDFYPFLKDNREKIEKILTFRIPYYVGPLARGNSRFAWMTRKSEETITPWNFEEVVDKGASAQSFIERMTNFDKNLPNEKVLPKHSLLYEYFTVYNELTKVKYVTEGMRKPAFLSGEQKKAIVDLLFKTNRKVTVKQLKEDYFKKIECFDSVEISGVEDRFNASLGTYHDLLKIIKDKDFLDNEENEDILEDIVLTLTLFEDREMIEERLKTYAHLFDDKVMKQLKRRRYTGWGRLSRKLINGIRDKQSGKTILDFLKSDGFANRNFMQLIHDDSLTFKEDIQKAQVSGQGDSLHEHIANLAGSPAIKKGILQTVKVVDELVKVMGRHKPENIVIEMARENQTTQKGQKNSRERMKRIEEGIKELGSQILKEHPVENTQLQNEKLYLYYLQNGRDMYVDQELDINRLSDYDVDHIVPQSFLKDDSIDNKVLTRSDKARGKSDNVPSEEVVKKMKNYWRQLLNAKLITQRKFDNLTKAERGGLSELDKAGFIKRQLVETRQITKHVAQILDSRMNTKYDENDKLIREVKVITLKSKLVSDFRKDFQFYKVREINNYHHAHDAYLNAVVGTALIKKYPKLESEFVYGDYKVYDVRKMIAKSEQEIGKATAKYFFYSNIMNFFKTEITLANGEIRKRPLIETNGETGEIVWDKGRDFATVRKVLSMPQVNIVKKTEVQTGGFSKESILPKRDSDKLIARKKDWDTKKYGGFDSPTVAYSVLVIAKVEKGKAKKLKTVKELVGITIMERSAFEKDPVAFLEAKGYKNIQKDLIIKLPKYSLFELENGRKRLLASAGELQKGNELALPQKYVTLLYHAKNYEKLKGSPEDEKEKLLYIEEHREEFDEIFDQISEFSKRYILADANLEKIKELYEQNKDASIEELASSFINLLTFTALGAPAAFKFFDTTIDRKRYTSTKEILNATLIHQSITGLYETRIDLSQLGGD

SEQ ID NO: 115 - protein, 1368 aa, synthetic construct
MKKKYSIGLDIGTNSVGWAVITDEYKVPSKKFKVLGNTDRQSIKKNLLGALLFDSGETAEATRLKRTARRRYTRRKNRIRYLQEIFAEEMAKVDDSFFQRLEESFLVEEDKRHERHPIFGNIVDEVAYHEKYPTIYHLRKELADSTEKADLRLIYLALAHMIKFRGHFLIEGDLNSENSDVDKLFIQLVQTYNQLFEENPLNEETVDAKAILSAKLSKSRRLENLIAQFPNQKKNGLFGNLIALSLGLTPNFKSNFDLSEDAKLQLSKDTYDEDLDELLGQIGDQYADLFLAAKNLSDAILLSGILTVNDEITKAPLSASMIKRYDEHHQDLTLLKALVREQLPEKYKEIFFDKSKNGYAGYIDGGASQEEFYKYIKPILEKIDGTEYFLDKINREDFLRKQRTFDNGSIPHQIHLGELHAILRRQEDFYPFLKENREKIEKILTFRIPYYVGPLARGNSRFAWMSRKSDETITPWNFEEVVDKEASAQSFIERMTNFDKNLPEEKVLPKHSLLYEYFTVYNELTKVKYVTEGMGKPEFFSGEQKEEIVDLLFKKNRKVTVKQLKEDLFKEIECFDIVEISGVEDRFNASLGTYHDLLKIIKDKDFLDNEENEDILEDIVLTLTLFEDREMIEERLKKYAHLFDKKVLKKLKRRRYTGWGRLSKKLINGIRDKQSGKTILDFLKDDGFANRNFMQLIHDDSLTFKEEIQKAQVIGQGDSLHEVIANLAGSPAIKKGILQSVKIVDELVKVMGRHKPENIVVEMARENQTTQKGQKNSRERLKRLEEGIKELGSQILKEHPVENTQLQNDKLYLYYLQNGKDMYTGEELDIDRLSDYDVDHIIPQSFIKDDSIDNKVLTSSAKARGKSDNVPSEEVVKKMKSYWRQLLKAKLISQRKFDNLTKAERGGLSELDKAGFIKRQLVETRQITKHVAQILDSRFNTKFDENDKLIRDVKIITLKSKLVSDFRKDFQFYKVREINDYHHAHDAYLNAVVGTALIKKYPKLESEFVYGDYPVYDVRKMIAKSEQEIGKATAKRFFYSNIMNFFKTEIKLADGEIRKRPQIETNEETGEIVWDKEKDFATVRKVLSMPQVNIVKKTEVQTGGFSKESILPKRNSDKLIARKKDWDPKKYGGFDSPTVAYSVLVVAKVEKGKAKKLKTVKELVGITIMERSSFEKNPIAFLEAKGYKDIQKDLIIKLPKYSLFELENGRKRMLASAGELQKGNELALPAKYVTLLYLASHYEKLKGSPEDNEKKMLFVEQHREYFDEILDQISEFSKRYILADKNLSKILELYNENNDKDISEQAESFINLFTFTALGAPAAFKFFDTTIDRKRYTSTKEILDSTLIHQSITGLYETRIDLSQLGGD

SEQ ID NO: 116 - protein, 1368 aa, synthetic construct
MKKSYSIGLDIGTNSVGWAVITDDYKVPSKKMKVLGNTDRQSIKKNLLGALLFDSGETAEATRLKRTARRRYTRRKNRICYLQEIFSNEMAKVDDSFFHRLEESFLVEEDKKHERHPIFGNIVDEVAYHEKYPTIYHLRKKLVDSTDKADLRLIYLALAHMIKFRGHFLIEGDLNPDNSDVDKLFIQLVQTYNQLFEENPINASGVDAKAILSARLSKSRRLENLIAQLPGEKKNGLFGNLIALSLGLTPNFKSNFDLAEDAKLQLSKDTYDDDLDNLLAQIGDQYADLFLAAKNLSDAILLSDILRVNTEITKAPLSASMIKRYDEHHQDLTLLKALVRQQLPEKYKEIFFDQSKNGYAGYIDGGASQEEFYKFIKPILEKMDGTEELLVKLNREDLLRKQRTFDNGSIPHQIHLGELHAILRRQEDFYPFLKDNREKIEKILTFRIPYYVGPLARGNSRFAWMTRKSEETITPWNFEEVVDKGASAQSFIERMTNFDKNLPNEKVLPKHSLLYEYFTVYNELTKVKYVTEGMRKPAFLSGEQKKAIVDLLFKTNRKVTVKQLKEDYFKKIECFDSVEISGVEDRFNASLGTYHDLLKIIKDKDFLDNEENEDILEDIVLTLTLFEDREMIEERLKTYAHLFDDKVMKQLKRRRYTGWGRLSRKLINGIRDKQSGKTILDFLKSDGFANRNFMQLIHDDSLTFKEDIQKAQVSGQGESLHEQVADLAGSPAIKKGILQSIKIVDEIVKVMGRHAPENIVIEMARENQTTAKGQKNSRERMKRIEEGIKELGSQILKEHPVENTQLQNEKLYLYYLQNGRDMYVDQELDINRLSDYDVDHIVPQSFLKDDSIDNKVLTRSDKARGKSDNVPSEEVVKKMKNYWRQLLNAKLITQRKFDNLTKAERGGLTDDDKAGFIKRQLVETRQITKHVAQILDSRFNTERDDNNKLIRDVKIITLKSKLVSDFRKDFQLYKVREINDYHHAHDAYLNAVVGKALIKKYPKLEPEFVYGDYPKYNSYKLVGKSDKERGKATAKMFFYSNIMNFFKSDVKLADGTIIKRPVIEVNEETGEIVWNKEKHIATIKKVLSMPQVNIVKKTEVQTGGFSKESILPKRNSDKLIARKKDWDPKKYGGFDSPTVAYSVLVVAKVEKGKSKKLKSVKELLGITIMERSSFEKNPIDFLEAKGYKEVKKDLIIKLPKYSLFELENGRKRMLASAGELQKGNELALPSKYVNFLYLASHYEKLKGSPEDNEQKQLFVEQHKHYLDEIIEQISEFSKRVILADANLDKVLSAYNKHRDKPIREQAENIIHLFTLTNLGAPAAFKYFDTTIDRKRYTSTKEVLDATLIHQSITGLYETRIDLSQLGGD

SEQ ID NO: 117 - protein, 1368 aa, synthetic construct
MDKKYSIGLDIGTNSVGWAVITDEYKVPSKKFKVLGNTDRKSIKKNLIGALLFDSGETAEATRLKRTARRRYTRRKNRIRYLQEIFSEEMAKVDDSFFHRLEESFLVEEDKKNERHPIFGNIVDEVAYHEKYPTIYHLRKKLADSTEKADLRLIYLALAHMIKFRGHFLIEGDLNAENSDVQKLFIQLVQTYNQLFEESPLEAEGVDAKAILTARLSKSRRLENLIAQLPGEKKNGLFGNLIALSLGLTPNFKSNFDLAEDAKLQLSKDTYDEDLENLLAQIGDEYADLFLAAKNLSDAILLSGILTVKDEITKAPLSASMIKRYDEHHQDLTLLKQFVRQQLPEKYKEIFFDQSKNGYAGYIDGGASQEEFYKYLKKILEKLDGTEEFLDKIEREDFLRKQRTFDNGSIPHQIHLQELHAILRRQEDYYPFLKENREKIEKILTFRIPYYVGPLARGNSRFAWMSRKSDETITPWNFEEVVDKGASAQKFIERMTNFDKNLPNEKVLPKHSLLYEYFTVYNELTKVKYVTEGMRKPIFLSSEQKQEIVDLLFKKNRKVTVKQLKEDYFKKIECFDSVEISGVEDRFNASLGTYHDLLKIIKDKDFLDNEENEDILEDIVLTLTLFEDREMIEERLKKYADLFDDKVMKQLKRRRYTGWGRLSKKLINGIRDKQSGKTILDYLIDDGFANRNFMQLIHDDSLTFKEEIEKAQVSGQGDSLHEVIANLAGSPAIKKGILQTIKIVDELVKVMGRHAPENIVIEMARENQTTQKGQKNSRERMKRLEEGIKELGSNILKEHPVENTQLQNDKLYLYYLQNGKDMYTGDELDIDRLSDYDVDHIVPQSFLKDDSIDNKVLTSSAKARGKSDNVPSEEVVKKMKNYWKQLLDAKLITQRKFDNLTKAERGGLTELDKAGFIKRQLVETRQITKHVAQILDSRFNTKYDENDKLIRDVKIITLKSKLVSDFRKDFQLYKVREINNYHHAHDAYLNAVVGTALIKKYPKLESEFVYGDYKVYDVRKMIAKSEQEIGKATAKMFFYSNIMNFFKTEVTLANGEIRKRPLIETNEETGEIVWDKEKDFATVRKVLSMPQVNIVKKTEVQTGGFSKESILPKRNSDKLIARKKDWDTKKYGGFDSPTVAYSVLVIAKVEKGKAKKLKTVKELVGITIMERSSFEKNPIDFLEAKGYKEVKKDLIIKLPKYSLFELENGRKRLLASAGELQKGNELALPNKYVELLYLAKHYEKLKGSPEDNEQKQLFVEQHKEYFDEILEQISEFSKRVILADANLEKIKKLYEKNEDKSIEEQAENFINLLTFTALGAPAAFKFFDTTIDRKRYTSTKEILNATLIHQSITGLYETRIDLSQLGGD

SEQ ID NO: 118 - protein, 1368 aa, synthetic construct
MDKKYSIGLDIGTNSVGWAVITDEYKVPSKKFKVLGNTDRKSIKKNLIGALLFDSGETAEATRLKRTARRRYTRRKNRIRYLQEIFAEEMSKVDDGFFQRLEESFLVEEDKKNERHPIFGNIVDEVAYHEKYPTIYHLRKYLADSTEKADLRLIYLALAHIIKFRGHFLIEGDLNSENTDVQKLFIQLVQTYNQLFEENPLNESGVDAKAILSAKLSKSRRLENLIAQLPGEKKNGLFGNLIALSLGLTPNFKSNFDLSEDAKLQLSKDTYDEDLDNLLAQIGDQYADLFLAAKNLSDAILLSDILTVNDESTKAPLSASMVKRYDEHHQDLTLLKALVREQLPEKYKEIFFDESKNGYAGYIDGGASQEEFYKYIKPILEKMDGTEYLLAKINREDFLRKQRTFDNGSIPHQIHLGELHAILRRQEDFYPFLKENQEKIEKILTFRIPYYVGPLARGNSRFAWMTRKSDETITPWNFEEVVDKEASAQSFIERMTNFDKNLPEEKVLPKHSLLYEYFTVYNELTKVKYVTEGMGKPEFLSGDQKEAIVDLLFKKNRKVTVKQLKEDYFKKIECFDSVEISGVEDRFNASLGTYHDLLKIIKDKDFLDNEENEDILEDIVLTLTLFEDREMIEQRLKKYAHLFDKKVLKKLKRRRYTGWGRLSRKLINGIRDKQSGKTILDFLKSDGFANRNFMQLIHDDSLTFKEIIAKAQVIGDGDSLHEVIANLAGSPAIKKGILQSVKIVDELVKVMGRHAPENIVIEMARENQTTQKGQKNSRERMKRIEEGIKELGSQILKEHPVENTQLQNEKLYLYYLQNGRDMYVDQELDINRLSDYDVDHIVPQSFLKDDSIDNKVLTRSDKARGKSDNVPSEEVVKKMKNYWRQLLNAKLITQRKFDNLTKAERGGLSELDKAGFIKRQLVETRQITKHVAQILDSRFNTEVDENDKLIREVKIITLKSKLVSDFRKDFQFYKVREINDYHHAHDAYLNAVVGTALIKKYPKLESEFVYGDYKVYDVRKMIAKSEQEIGKATAKYFFYSNIMNFFKSEVTLANGTIRKRPLIETNEETGEIVWDKGKDFATVRKVLSMPQVNIVKKTEVQTGGFSKESILPKRNSDKLIARKKDWDPKKYGGFDSPTVAYSVLVVAKIEKGKTKKLKTVKELVGITIMERSSFEKDPVAFLETKGYKDIRIDLIIKLPKYSLFELENGRKRMLASAGELQKGNELALPSKYVTFLYLASHYEKLKGKPEDREDKLEYVEQHRHYFDEILEQIIEFSERYILADANLEKIKELYNENNDYPIEELAENFIHLFTFTSLGAPAAFKFFDKTIDRKRYTSTTEVLNATLIHQSITGLYETRIDLSQLGGD

SEQ ID NO: 119 - protein, 1368 aa, synthetic construct
MDKKYSIGLDIGTNSVGWAVITDEYKVPSKKFKVLGNTDRHSIKKNLIGALLFDSGETAEATRLKRTARRRYTRRKNRICYLQEIFSNEMAKVDDSFFQRLEESFLVEEDKSNDRHPIFGNIVEEVAYHEKYPTIYHLRKHLADSPEKADLRLVYLALAHIIKFRGHFLIEGDLDAENTDVQKLFKELVEVYDRTFEESELEEETIDAESILTEKLSKSRRLENLIAKFPGEKKNSFFGNLIALALGLTPNFKSNFELSEDAKLQFSKDTYEEDLEELLGQIGDDYADLFTAAKNLYDAILLSGILTVDDNSTKAPLSASMVKRYDEHHQDLTLLKKFVRENLPEKYKEIFFDQSKNGYAGYIDGGASQEEFYKYLKKLLEKIDGSEYFLDKIEREDFLRKQRTFDNGSIPHQIHLQELHAIIRRQGEYYPFLKENQEKIEKILTFRIPYYVGPLARGNSRFAWLSRKSDETITPWNFDEVVDKEKSAEKFITRMTNFDKNLPEEKVLPKHSLLYEKFTVYNELTKVKYVTEGGKKEEFFDANMKQEIFDNVFKKYRKVTKKQLLDYLAKEFDEFDIVDISGVEDRFNASLGTYHDLKKILGDKSFLDNPANEKILEDIIKTLTLFEDREMIKKRLEKYSDLFDKKQLKKLERRRYTGWGRLSAKLINGIRDKETGKTILDYLIEDGPTNRNFMQLIHDDGLSFKEEISKAQVIDDTDSLHEHIANLAGSPAIKKGILQTVKVVDELVKVMGRHKPENIVIEMARENQTTQKGQKNSRERMKRIEEGIKELGSQILKEHPVENTQLQNEKLYLYYLQNGRDMYVDQELDINRLSDYDVDHIVPQSFLKDDSIDNKVLTRSDKARGKSDNVPSEEVVKKMKNYWRQLLNAKLITQRKFDNLTKAERGGLSELDKAGFIKRQLVETRQITKHVAQILDSRMNTKYDENDKLIREVKVITLKSKLVSDFRKDFQFYKVREINNYHHAHDAYLNAVVGTALIKKYPKLESEFVYGDYKVYDVRKMIAKSEQEIGKATAKYFFYSNIMNFFKTEITLANGEIRKRPLIETNGETGEIVWDKGRDFATVRKVLSMPQVNIVKKTEVQTGGFSKESILPKRNSDKLIARKKDWDPKKYGGFDSPTVAYSVLVVAKVEKGKSKKLKSVKELLGITIMERSSFEKNPIDFLEAKGYKEVKKDLIIKLPKYSLFELENGRKRMLASAGELQKGNELALPSKYVNFLYLASHYEKLKGSPEDNEQKQLFVEQHKHYLDEIIEQISEFSKRVILADANLDKVLSAYNKHRDKPIREQAENIIHLFTLTNLGAPAAFKYFDTTIDRKRYTSTKEVLDATLIHQSITGLYETRIDLSQLGGD

SEQ ID NO: 120 - protein, 1368 aa, synthetic construct
MDKKYSIGLDIGTNSVGWAVITDEYKVPSKKFKVLGNTDRHSIKKNLIGALLFDSGETAEATRLKRTARRRYTRRKNRICYLQEIFSNEMAKVDDSFFQRLEESFLVEEDKRGERHPIFGNIVDEVAYHEKYPTIYHLRKELADSTEKADLRLVYLALAHIIKFRGHFLIEGDLNSENTDVQKLFKQFVQVYNQTFEESHLSEETVDAESILTEKVSKSRRLENLIKQFPNEKKNGLFGNLIALSLGLQPNFKSNFNLSEDAKLQFSKDTYDEDLENLLGQIGDEYADLFVAAKNLYDAILLSGILTVNDESTKAPLSASMIKRYDEHHQDLTLLKAFVRQQLPEKYKEIFFDETKNGYAGYIDGGASQEEFYKYIKPILEKVDGSEYFLDKIDREDFLRKQRTFDNGSIPHQIHLQELHAILRRQEEFYPFLKENQEKIEKILTFRIPYYVGPLARGNSRFAWASRKSDETITPWNFEEVVDKEASAEAFIERMTNNDKNLPEEKVLPKHSLLYEKFTVYNELTKVKYVTEQMGKPKFFDANMKQEIFDGLFKKERKVTKKKLLDFLFKEFDEFRIVDISGVEDAFNASLGTYHDLLKIIKDKDFLDNEENEDILEDIILTLTLFEDREMIEERLKKYADLFDKKVLKKLKRRRYTGWGRLSKKLINGIRDKQSGKTILDYLIDDGFANRNFMQLIHDDSLSFKEEIAKAQVIGQGDSLHEHIANLAGSPAIKKGILQTVKVVDELVKVMGRHKPENIVIEMARENQTTQKGQKNSRERMKRIEEGIKELGSQILKEHPVENTQLQNEKLYLYYLQNGRDMYVDQELDINRLSDYDVDHIVPQSFLKDDSIDNKVLTRSDKARGKSDNVPSEEVVKKMKNYWRQLLNAKLITQRKFDNLTKAERGGLSELDKAGFIKRQLVETRQITKHVAQILDSRMNTKYDENDKLIREVKVITLKSKLVSDFRKDFQFYKVREINNYHHAHDAYLNAVVGTALIKKYPKLESEFVYGDYKVYDVRKMIAKSEQEIGKATAKYFFYSNIMNFFKTEITLANGEIRKRPLIETNGETGEIVWDKGRDFATVRKVLSMPQVNIVKKTEVQTGGFSKESILPKRNSDKLIARKKDWDTKKYGGFDSPTVAYSVLVVADIEKGKAKKLKTVKELVGITIMERSSFEKNPVAFLESKGYQNIQEDKIIKLPKYSLFELENGRKRLLASAGELQKGNELALPQKYVTLLYHAKHYEKLKGKDEDNEKHLEYVEQHRDEFDEILDQISEFSERYILADKNLEKIKELYEKNEDASIEELASSFINLLTLTALGAPAAFKFFGTTIDRKRYTSTKEILNATLIHQSITGLYETRIDLSKLGGD

SEQ ID NO: 121 - protein, 1368 aa, synthetic construct
MDKKYSIGLDIGTNSVGWAVITDEYKVPSKKFKVLGNTDRHSIKKNLIGALLFDSGETAEATRLKRTARRRYTRRKNRICYLQEIFSNEMAKVDDSFFHRLEESFLVEEDKKHERHPIFGNIVDEVAYHEKYPTIYHLRKKLADSTEKADLRLIYLALAHIIKFRGHFLIEGDLNSENSDVDKLFIQLVQTYNQLFEENPINEEGVDAKAILSAKLSKSRRLENLIAQFPGEKRNGLFGNLIALSLGLTPNFKSNFDLAEDAKLQLSKDTYDEDLDNLLAQIGDQYADLFLAAKNLSDAILLSDILTVNSEITKAPLSASMIKRYDEHHQDLTLLKALVRQQLPEKYKEIFFDESKNGYAGYIDGGASQEEFYKYIKPILEKMDGTEELLAKINREDFLRKQRTFDNGSIPHQIHLGELHAILRRQEDFYPFLKENREKIEKILTFRIPYYVGPLARGNSRFAWMTRKSEETITPWNFEEVVDKEASAQSFIERMTNFDKNLPNEKVLPKHSLLYEYFTVYNELTKVKYVTEGMGKPEFLSGEQKQEIVDLLFKKNRKVTVKQLKEFLFKKIECFDSVEISGVEDRFNASLGTYHDLLKIIKDKDFLDNEENEDILEDIVLTLTLFEDKEMIEERLKKYANLFDKKVLKQLKRRRYTGWGRLSKKLINGIRDKQSGKTILDFLKSDGFANRNFMQLIHDDSLTFKEEIAKAQVSGQGDSLHEHIANLAGSPAIKKGILQTVKVVDELVKVMGRHKPENIVIEMARENQTTQKGQKNSRERMKRIEEGIKELGSQILKEHPVENTQLQNEKLYLYYLQNGRDMYVDQELDINRLSDYDVDHIVPQSFLKDDSIDNKVLTRSDKARGKSDNVPSEEVVKKMKNYWRQLLNAKLITQRKFDNLTKAERGGLSELDKAGFIKRQLVETRQITKHVAQILDSRMNTKYDENDKLIREVKVITLKSKLVSDFRKDFQFYKVREINNYHHAHDAYLNAVVGTALIKKYPKLESEFVYGDYKVYDVRKMIAKSEQEIGKATAKYFFYSNIMNFFKTEITLANGEIRKRPLIETNGETGEIVWDKGRDFATVRKVLSMPQVNIVKKTEVQTGGFSKESILPKRKSDKLIARKKDWDPKKYGGFDSPTVAYSVLVVAKVEKGKSKKLKTVKELVGITIMERSSFEKDPVDFLEAKGYKEVQKDLIIKLPKYSLFELENGRKRMLASAGELQKGNELALPSKYVTLLYLASHYEKLKGSPEDNEQHREYVEQHRHYFDEILDQISEFSERYILADKNLEKILELYSEFEDYSIEEQAESFINLFTLTALGAPAAFKFFDTTIDRKRYTSTKEILNATLIHQSITGLYETRIDLSQLGGD

SEQ ID NO: 122 - protein, 1368 aa, synthetic construct
MDKKYSIGLDIGTNSVGWAVITDEYKVPSKKFKVLGNTDRQSIKKNLIGALLFDSGETAEATRLKRTARRRYTRRKNRIRYLQEIFAEEMSKVDDSFFHRLEESFLVEEDKKHERHPIFGNIVDEVAYHEKYPTIYHLRKKLVDSTEKADLRLIYLALAHMIKFRGHFLIEGDLNSENSDVDKLFIQLVQTYNQLFEENPINESGVDAKAILSAKLSKSRRLENLIAQLPGEKKNGLFGNLIALSLGLTPNFKSNFDLAEDAKLQLSKDTYDDDLDNLLAQIGDQYADLFLAAKNLSDAILLSDILRVNTEITKAPLSASMIKRYDEHHQDLTLLKALVRQQLPEKYKEIFFDKSKNGYAGYIDGGASQEEFYKFIKPILEKMDGTEELLAKLNREDLLRKQRTFDNGSIPHQIHLGELHAILRRQEDFYPFLKENREKIEKILTFRIPYYVGPLARGNSRFAWMTRKSDETITPWNFEEVVDKGASAQSFIERMTNFDKNLPEEKVLPKHSLLYEYFTVYNELTKVKYVTEGMGKPEFLSGEQKKEIVDLLFKKNRKVTVKQLKEFYFKEIECFDSVEISGVEDRFNASLGTYHDLLKIIKDKDFLDNEENEDILEDIVLTLTLFEDREMIEERLKKYANLFDKKVMKQLKRRRYTGWGRLSRKLINGIRDKQSGKTILDFLKSDGFANRNFMQLIHDDSLTFKEEIEKAQVKGQGDSLHEQIANLAGSPAIKKGILQTVKVVDELVKVMGRHKPENIVIEMARENQTTQKGQKNSRERMKRIEEGIKELGSQILKEHPVENTQLQNEKLYLYYLQNGRDMYTGQELDINRLSDYDVDHIVPQSFLKDDSIDNKVLTRSKKARGKSDNVPSEEVVKKMKSYWRQLLKAKLITQRKFDNLTKAERGGLSELDKAGFIKRQLVETRQITKHVAQILDSRMNTKRDENDKLIRDVKVITLKSKLVSDFRKDFQFYKVREINNYHHAHDAYLNAVVGTALIKKYPKLESEFVYGDYKVYDVRKMIAKSEQEIGKATAKYFFYSNIMNFFKSEITLANGEIRKRPVIETNEETGEIVWDKERDFATVRKVLSMPQVNIVKKTEVQTGGFSKESILPKRESDKLIARKKDWDPKKYGGFDSPTVAYSVLVVAKIEKGKTKKLKTVKELLGITIMERSSFEKDPVAFLEAKGYKEVKKDLIIKLPKYSLFELENGRKRMLASAGELQKGNELALPSKYVNFLYLASHYEKLKGSPEDNEQKQLFVEQHKDYLDEIIDQISEFSERVILADKNLEKVLSAYNENRDKSIEEQAENIIHLFTLTNLGAPAAFKYFDTTIDRKRYTSTKEVLDATLIHQSITGLYETRIDLSQLGGD

SEQ ID NO: 123 - protein, 1368 aa, synthetic construct
MDKKYSIGLDIGTNSVGWAVITDEYKVPSKKFKVLGNTDRHSIKKNLIGALLFDSGETAEATRLKRTARRRYTRRKNRILYLQEIFSNEMAKVDDSFFHRLEESFLVEEDKRHERHPIFGNIVDEVAYHEKYPTIYHLRKKLADSTEKADLRLIYLALAHMIKFRGHFLIEGDLNSDNSDVQKLFIQLVQTYNQLFEENPINEEGVDAKAILTARLSKSRRLENLIAQLPGEKKNGLFGNLIALSLGLTPNFKSNFDLAEDAKLQLSKDTYDEDLENLLAQIGDQYADLFLAAKNLSDAILLSGILTVNTEITKAPLSASMVKRYDEHHQDLTLLKQLVRKQLPEKYKEIFFDQSKNGYAGYIDGGASQEEFYKYLKPILEKMDGTEEFLAKINREDFLRKQRTFDNGSIPHQIHLGELHAILRRQEEYYPFLKENREKIEKILTFRIPYYVGPLARGNSRFAWMTRKSDETITPWNFEEVVDKEASAQAFIERMTNFDKNLPNEKVLPKHSLLYEYFTVYNELTKVKYVTEGMRKPEFLSAEQKQEIVDLLFKKNRKVTVKQLKEDYFKKFECFDSVEISGVEDRFNASLGTYHDLLKIIKDKDFLDNEENEKILEDIVLTLTLFEDREMIEERLKKYADLFDDKQLKQLKRRRYTGWGRLSRKLINGIRDKQSGKTILDFLKADGFANRNFMQLIHDDSLTFKEEIQKAQVSGQGDSLHETIANLAGSPAIKKGILQTLKIVDELVKVMGRHEPENIVIEMARENQTTQKGQKNSRERMKRIEEGIKELGSQILKEHPVENTQLQNEKLYLYYLQNGRDMYVDQELDINRLSDYDVDHIVPQSFLKDDSIDNKVLTRSDKARGKSDNVPSEEVVKKMKNYWRQLLNAKLITQRKFDNLTKAERGGLSELDKAGFIKRQLVETRQITKHVAQILDSRFNTKYDENDKLIRDVKIITLKSKLVSDFRKDFQFYKVREINNYHHAHDAYLNAVVGTALIKKYPKLESEFVYGDYKVYDVRKMIAKSEQEIGKATAKYFFYSNIMNFFKTEITLANGEIRKRPLIETNGETGEIVWDKGKDFATVRKVLSMPQVNIVKKTEVQTGGFSKESILPKRNSDKLIARKKDWDPKKYGGFDSPTVAYSVLVVAKVEKGKAKKLKTVKELVGITIMERSSFEKNPIAFLEAKGYKEVKKDLIIKLPKYSLFELENGRKRMLASAGELQKGNELALPNKYVNLLYLASHYEKLKGSPEDNEQKQLFVEQHKHYFDEIIEQISEFSKRVILADANLEKIKSLYEKNRDKSIEELAENFIHLFTFTALGAPAAFKFFDTTIDRKRYTSTKEILNATLIHQSITGLYETRIDLSQLGGD

SEQ ID NO: 124 - protein, 1368 aa, synthetic construct
MDKKYSIGLDIGTNSVGWAVITDDYKVPSKKFKVLGNTDRQSIKKNLIGALLFDSGETAEATRLKRTARRRYTRRKNRIRYLQEIFAEEMAKVDDSFFHRLEESFLVEEDKKHERHPIFGNIVDEVAYHEKYPTIYHLRKKLVDSTEKADLRLIYLALAHMIKFRGHFLIEGDLNSENSDVDKLFIQLVQTYNQLFEENPINEEGVDAKAILSAKLSKSRRLENLIAQFPGEKKNGLFGNLIALSLGLTPNFKSNFDLSEDAKLQLSKDTYDDDLDNLLAQIGDQYADLFLAAKNLSDAILLSDILRVNTEITKAPLSASMIKRYDEHHQDLTLLKALVRQQLPEKYKEIFFDESKNGYAGYIDGGASQEEFYKFIKPILEKMDGTEELLAKLNREDLLRKQRTFDNGSIPHQIHLGELHAILRRQEEFYPFLKENREKIEKILTFRIPYYVGPLARGNSRFAWMTRKSDETITPWNFEEVVDKGASAQSFIERMTNFDENLPEEKVLPKHSLLYEYFTVYNELTKVKYVTEGMRKPEFLSGEQKKEIVDLLFKKNRKVTVKQLKEDYFKKIECFDSVEISGVEDRFNASLGTYHDLLKIIKDKDFLDNEENEDILEDIVLTLTLFEDREMIEERLKKYANLFDDKVMKQLKRRRYTGWGRLSRKLINGIRDKQSGKTILDFLKSDGFANRNFMQLIHDDSLTFKEEIEKAQVKGQGDSLHEQIANLAGSPAIKKGILQTVKVVDELVKVMGRHKPENIVIEMARENQTTQKGQKNSRERMKRIEEGIKELGSQILKEHPVENTQLQNDKLYLYYLQNGRDMYTGQELDINRLSQYDVDHIVPQSFLKDDSIDNKVLTRSAKARGKSDNVPSEEVVKKMKNYWRQLLKAKLITQRKFDNLTKAERGGLSELDKAGFIKRQLVETRQITKHVAQILDSRMNTKRDENDKLIRDVKVITLKSKLVSDFRKDFQFYKVREINNYHHAHDAYLNAVVGTALIKKYPKLESEFVYGDYKKYDVRKMIAKSEQEIGKATAKYFFYSNIMNFFKTEIKLANGEIRKRPLIETNEETGEIVWDKERDFATVRKVLSMPQVNIVKKTEVQTGGFSKESILPKRESDKLIARKKGWDPKKYGGFDSPTVAYSVLVVAKVEKGKTKKLKTVKELLGITIMERSSFEKDPVAFLEAKGYKDVKKDLIIKLPKYSLFELENGRKRMLASAGELQKGNELALPSKYVNFLYLASHYESLKGSPEDNEKKQEYVEQHKHYLDEIIDQISEFSERVILADANLEKVLSAYNNFRDKSIEEQAENIIHLFTLTNLGAPAAFKYFDTTIDRKRYTSTKEVLDATLIHQSITGLYETRIDLSQLGGD

SEQ ID NO: 125 - protein, 1368 aa, synthetic construct
MDKKYSIGLDIGTNSVGWAVITDEYKVPSKKFKVLGNTDRHSIKKNLIGALLFDSGETAEATRLKRTARRRYTRRKNRICYLQEIFSNEMAKVDESFFHRLEESFLVEEDKSFERHPIFGNIVEEVAYHEKYPTIYHLRKKLVDSPEKADLRLIYLALAHMIKFRGHFLIEGDLNSDNSDVQKLFKQLVQTYNQLFEESPIEAEGVDAKSILSEKLSKSRRLENLIAQLPGEKKNGLFGNLIALSLGLTPNFKSNFDLSEDAKLQLSKDTYDDDLEELLGQIGDEYADLFLAAKNLSDAILLSGILRVDTESTKAPLSASMIKRYDEHHQDLTLLKQLVREQLPEKYKEIFFDQSKNGYAGYIDGGASQEEFYKYIKKILEKMDGTEELLDKLEREDLLRKQRTFDNGSIPHQIHLGELHAILRRQEEYYPFLKENREKIEKILTFRIPYYVGPLARGNSRFAWMSRKSDETITPWNFDEVVDKGASAEKFIERMTNFDKNLPEEKVLPKHSLLYEYFTVYNELTKVKYVTEGMRKPEFLDGNQKKEIVDDLFKKNRKVTVKQLKEYYFKKEECFDSVEISGVEDRFNASLGTYHDLLKIIKDKSFLDNDENEKILEDIVLTLTLFEDREMIKKRLEKYADLFDKKVMKQLKRRRYTGWGRLSKKLINGIRDKQSGKTILDFLIDDGFANRNFMQLIHDDSLTFKDEIAKAQVIGKGDSLHEHIANLAGSPAIKKGILQTVKVVDELVKVMGRHKPENIVIEMARENQTTQKGQKNSRERMKRIEEGIKELGSQILKEHPVENTQLQNEKLYLYYLQNGRDMYVDQELDINRLSDYDVDHIVPQSFLKDDSIDNKVLTRSDKARGKSDNVPSEEVVKKMKNYWRQLLNAKLITQRKFDNLTKAERGGLSELDKAGFIKRQLVETRQITKHVAQILDSRMNTKYDENDKLIREVKVITLKSKLVSDFRKDFQFYKVREINNYHHAHDAYLNAVVGTALIKKYPKLESEFVYGDYKVYDVRKMIAKSEQEIGKATAKYFFYSNIMNFFKTEITLANGEIRKRPLIETNGETGEIVWDKGRDFATVRKVLSMPQVNIVKKTEVQTGGFSKESILPKRNSDKLIARKKDWDPKKYGGFDSPTVAYSVLVVAKVEKGKSKKLKSVKELLGITIMERSSFEKNPIDFLEAKGYKEVKKDLIIKLPKYSLFELENGRKRMLASAGELQKGNELALPSKYVNFLYLASHYEKLKGSPEDNEQKQLFVEQHKHYLDEIIEQISEFSKRVILADANLDKVLSAYNKHRDKPIREQAENIIHLFTLTNLGAPAAFKYFDTTIDRKRYTSTKEVLDATLIHQSITGLYETRIDLSQLGGD

SEQ ID NO: 126 - protein, 1368 aa, synthetic construct
MDKKYSIGLDIGTNSVGWAVITDEYKVPSKKFKVLGNTDRHSIKKNLIGALLFDSGETAEATRLKRTARRRYTRRKNRICYLQEIFSNEMAKVDDSFFHRLEESFLVEEDKRNERHPIFGNIVEEVAYHEKYPTIYHLRKKLADSDEKADLRLVYLALAHIIKFRGHFLIEGDLDAENTDVQKLFRELVEVYNQTFEESPLEEITVDAEAILTEKLSKSRRLENLIAQFPGEKKNGLFGNLLALALGLTPNFKSNFDLEEDAKLQFSKDTYDEDLEELLGQIGDEYADLFLAAKKLYDAILLSGILTVDDESTKAPLSASMVKRYDEHHQDLTLLKQFIRKKLPEKYKEIFFDQSKNGYAGYIDGGASQEEFYKYLKKILEKIDGSEEFLDKIEREDFLRKQRTFDNGSIPHQIHLQELHAIIRRQEEYYPFLKENREKIEKILTFRIPYYVGPLARGNSRFAWLSRKSDETITPWNFDEVVDKEKSAEAFIERMTNFDKNLPEEKVLPKHSLLYEKFTVYNELTKVKYVTEGGKKPEFFDAEQKQEIFDNLFKKERKVTKKQLKDYLFKEFDEFRIVEISGVEDRFNASLGTYHDLLKIIKDKDFLDNPENEEILEDIILTLTLFEDREMIKKRLEKYADLFDKKQLKKLSRRRYTGWGRLSAKLINGIRDKQTGKTILDYLIDDGFANRNFMQLIHDDSLTFKEEIEKAQVIGDGDSLHEHIANLAGSPAIKKGILQTVKVVDELVKVMGRHKPENIVIEMARENQTTQKGQKNSRERMKRIEEGIKELGSQILKEHPVENTQLQNEKLYLYYLQNGRDMYVDQELDINRLSDYDVDHIVPQSFLKDDSIDNKVLTRSDKARGKSDNVPSEEVVKKMKNYWRQLLNAKLITQRKFDNLTKAERGGLSELDKAGFIKRQLVETRQITKHVAQILDSRMNTKYDENDKLIREVKVITLKSKLVSDFRKDFQFYKVREINNYHHAHDAYLNAVVGTALIKKYPKLESEFVYGDYKVYDVRKMIAKSEQEIGKATAKYFFYSNIMNFFKTEITLANGEIRKRPLIETNGETGEIVWDKGRDFATVRKVLSMPQVNIVKKTEVQTGGFSKESILPKRDSDKLIARKKDWDTKKYGGFDSPTVAYSVLVVADVEKGKAKKLKTVKELVGITIMERSAFEKNPVAFLEDKGYQNIKKELIIKLPKYSLFELENGRKRLLASAGELQKGNELALPQHYVTLLYHAKHYEKLKGSPEDNEYKQLYVEEHKDEFDEILDQIIEFSKRYILADANLEKIKSLYEKNKDASIEELAENFIHLLTFTALGAPAAFKFFGKTIDRKRYTSTKEILNATLIHQSITGLYETRIDLSKLGGD

SEQ ID NO: 127 - protein, 1368 aa, synthetic construct
MDKKYSIGLDIGTNSVGWAVITDEYKVPSKKFKVLGNTDRHSIKKNLIGALLFDSGETAEATRLKRTARRRYTRRKNRICYLQEIFSNEMAKVDDSFFHRLEESFLVEEDKRGERHPIFGNIVEEVAYHEKYPTIYHLRKHLADSTEKADLRLVYLALAHIIKFRGHFLIEGDLNAENSDVQKLFKQLVEVYDQTFEESPLSEITVDAKAILTEKLSKSRRLENLIKQFPNEKKNGLFGNLIALSLGLQPNFKTNFNLSEDAKLQFSKDTYDEDLENLLGQIGDEYADLFLAAKNLYDAILLSGILTVNDESTKAPLSASMIKRYDEHHQDLTLLKQFIRKQLPEKYKEIFFDESKNGYAGYIDGGASQEEFYKYIKKLLEKMDGSEYFLDKIEREDFLRKQRTFDNGSIPHQIHLQELHAILRRQEEYYPFLKENQEKIEKILTFRIPYYVGPLARGNSRFAWMTRKSDETITPWNFDEVVDKEKSAEAFIERMTNNDKNLPEEKVLPKHSLLYEKFTVYNELTKVKYVTEGMGKAQFFDANQKQEIFDGLFKKYRKVTKKKLLDFLDKEFDEFRIVDISGVEDAFNASLGTYHDLLKIIKDKDFLDNPENEDILEDIILTLTLFEDREMIEKRLSKYADLFDKKVLKKLKRRRYTGWGRLSKKLINGIRDKQSGKTILDYLIDDGFANRNFMQLIHDDSLSFKEEIKKAQVIGQGDSLHEHIANLAGSPAIKKGILQTVKVVDELVKVMGRHKPENIVIEMARENQTTQKGQKNSRERMKRIEEGIKELGSQILKEHPVENTQLQNEKLYLYYLQNGRDMYVDQELDINRLSDYDVDHIVPQSFLKDDSIDNKVLTRSDKARGKSDNVPSEEVVKKMKNYWRQLLNAKLITQRKFDNLTKAERGGLSELDKAGFIKRQLVETRQITKHVAQILDSRMNTKYDENDKLIREVKVITLKSKLVSDFRKDFQFYKVREINNYHHAHDAYLNAVVGTALIKKYPKLESEFVYGDYKVYDVRKMIAKSEQEIGKATAKYFFYSNIMNFFKTEITLANGEIRKRPLIETNGETGEIVWDKGRDFATVRKVLSMPQVNIVKKTEVQTGGFSKESILPKRDSDKLIARKKDWDTKKYGGFDSPTVAYSVLVVADIEKGKAKKLKTVKELIGITIMERSSFEKNPVAFLEDKGYKNIQEETIIKLPKYSLFELENGRKRLLASAGELQKGNELALPNKYVTLLYHAKHYEKLKGKPEDEEKHLEYVEKHRDEFNEILDQISEFSERYILADKNLSKINELYKKNNDKSIEELASSFINLLTFTALGAPAAFKFLGTTIDRKRYTSTKEILNATLIHQSITGLYETRIDLSKLGGD

SEQ ID NO: 128 - protein, 1368 aa, synthetic construct
MDKPYSIGLDIGTNSVGWAVVTDEYKVPSKKFKVLGNTDRHSIKKNLLGALLFDSGETAEATRLKRTARRRYTRRKNRILYLQEIFAEEMAKVDDSFFHRLEESFLVEEDKRGERHPIFGNIVEEVAYHEKYPTIYHLRKKLADSDEKADLRLVYLALAHIIKFRGHFLIEGDLNAENSDVQKLFDQLVQTYNRLFEESPLEEEEVDAEAILTEKLSKSRRLENLIAQFPGEKKNGLFGNLIALSLGLTPNFKSNFDLAEDAKLQFSKDTYDEDLEELLAQIGDEYADLFLAAKNLYDAILLSGILTVSDESTKAPLSASMVKRYDEHHQDLTLLKKFIRKQLPEKYKEIFFDQSKNGYAGYIDGGASQEEFYKYLKKILEKIDGSEEFLDKIEREDFLRKQRTFDNGSIPHQIHLQELHAILRRQEKYYPFLKENQEKIEKILTFRIPYYVGPLARGNSRFAWMSRKSDETITPWNFEEVVDKEASAEKFIERMTNFDKNLPNEKVLPKHSLLYEKFTVYNELTKVKYVTEGMRKPKFFSAEQKQEIVDLLFKKNRKVTKKQLKEYLKKEFECFDIVEISGVEDRFNASLGTYHDLLKIIKDKDFLDNEENEEILEDIVLTLTLFEDREMIKKRLEKYADLFDKKQLKKLKRRRYTGWGRLSAKLINGIRDKQSGKTILDYLIDDGFANRNFMQLIHDDSLTFKEEIAKAQVIGQGDSLHEVIANLAGSPAIKKGILQSLKIVDELVKVMGRHEPENIVIEMARENQTTQKGQKNSRERMKRLEEAIKELGSKILKEHPVENTKLQNDKLYLYYLQNGKDMYTGEELDIDRLSDYDVDHIVPQSFLKDDSIDNKVLVSSKKARGKSDDVPSEEVVKKMKGYWKKLLDAKLITQRKFDNLTKAERGGLTELDKAGFIKRQLVETRQITKHVAQILDSRFNTEYDENDKLIRDVKIITLKSKLVSQFRKDFELYKVREINNYHHAHDAYLNAVVGTALIKKYPKLESEFVYGDYKVYDVRKMIAKSEQEIGKATAKYFFYSNIMNFFKTEVKLANGEIRKRPLIEVNEETGEIVWDKEKDFATVRKVLSMPQVNIVKKTEVQTGGFSKESILPKRDSDKLIARKKDWDTKKYGGFDSPTVAYSVLVIAKVEKGKAKKLKTVKELVGITIMERSAFEKNPIAFLEDKGYQNIKKDLIIKLPKYSLFELENGRKRLLASAGELQKGNELALPNKYVELLYHAKHYEKLKGKPEDNEEKQLYVEQHKSYFDEILEQISEFSKRYILADANLEKIKKLYEKNRDASIEELAESFINLLTFTALGAPAAFKFFDTTIDRKRYTSTKEILNATLIHQSITGLYETRIDLSKLGGD

SEQ ID NO: 129 - protein, 1368 aa, synthetic construct
MDKKYSIGLDIGTNSVGWAVVTDDYKVPSKKFKVLGNTDRKSIKKNLLGALLFDSGETAEATRLKRTARRRYTRRKNRICYLQEIFSNEMAKVDESFFHRLEESFLVEEDKRGERHPIFGNIVEEVAYHEKFPTIYHLRKELADSPEKADLRLVYLALAHIIKFRGHFLIEGDLNSENTDVDKLFIQLVQTYNQLFEENPINASGVDAKAILSARLSKSRRLENLIAQLPGEKKNGLFGNLIALSLGLTPNFKSNFDLAEDAKLQLSKDTYDDDLDNLLAQIGDQYADLFLAAKNLSDAILLSDILRVNDESTKAPLSASMVKRYEEHHKDLTLLKQFIRKQLPEKYKEIFFDKSKNGYAGYIDGGASQEEFYKYIKKILEKIDGSEEFLDKIEREDFLRKQRTFDNGSIPHQIHLQELHAILRRQEKYYPFLKENQEKIEKILTFRIPYYVGPLARGNSRFAWLSRKSEETITPWNFDEIVDKEASAEAFIERMTNFDKNLPNEKVLPKHSLLYEKFTVYNELTKVKYVTEGGKKPKFFDANQKQEIVDLLFKKNRKVTKKQLKDFLNKEFDEFRIVEISGVEDRFNASLGTYHDLLKIIGDKDFLDNSENEEILEDIILTLTLFEDREMIKKRLEKYADLFDKEQLKKLERRRYTGWGRLSAKLINGIRDKQSGKTILDYLIDDGFANRNFMQLIHDDSLSFKEEIAKAQVIGDTDSLHEIIANLAGSPAIKKGILQSIKIVDELVKVMGRYAPENIVVEMARENQTTAKGQKNSRERMKRIEEGIKELGSQILKEHPVENTQLQNEKLYLYYLQNGRDMYVDQELDINRLSDYDVDHIVPQSFLKDDSIDNKVLTRSDKARGKSDNVPSEEVVKKMKNYWRQLLNAKLITQRKFDNLTKAERGGLTDDDKAGFIKRQLVETRQITKHVAQILDSRFNTEYDENGKLIRKVKIVTLKSKLVSDFRKDFELYKVREINDYHHAHDAYLNAVVGKALIKKYPKLESEFVYGDYPKYNSRKMIAKSDRERGKATAKMFFYSNIMNFFKSDVKLADGEIRERPLIEVNEETGEIVWDKVKHIATVKKVLSMPQVNIVKKTEVQTGGFSKESILPKRDSDKLIARKKDWDTKKYGGFDSPTVAYSVLVVADIEKGKAKKLKTVKELVGITIMERSAFEKDPVAFLEDKGYQNIQEDNIIKLPKYSLFELENGRKRLLASAGELQKGNELALPNHLVTLLYHAKHIEKLKGKPEDEEEKLSYVEQHREEFDELLDQIIEFSKRYILADANLEKIKKLYEKNEEADIEELASSFINLLTFTALGAPAAFKFFDKTIDRKRYTSTKEILNATLIHQSITGLYETRIDLSKLGGD

SEQ ID NO: 130 - protein, 1368 aa, synthetic construct
MDKKYSIGLDIGTNSVGWAVITDEYKVPSKKFKVLGNTDRQSIKKNLIGALLFDSGETAEATRLKRTARRRYTRRKNRIRYLQEIFSEEMSKVDDSFFHRLEESFLVEEDKKHERHPIFGNIVDEVAYHEKYPTIYHLRKKLADSTEKADLRLIYLALAHIIKFRGHFLIEGDLNPENSDVQKLFIQLVQTYNQLFEENPINESGVDAKAILSAKLSKSRRLENLIAQLPGEKKNGLFGNLIALSLGLTPNFKSNFDLAEDAKLQLSKDTYDEDLDNLLAQIGDQYADLFLAAKNLSDAILLSDILTVNSEITKAPLSASMIKRYDEHHQDLTLLKALVRQQLPEKYKEIFFDKSKNGYAGYIDGGASQEEFYKYIKPILEKMDGTEELLAKLNREDLLRKQRTFDNGSIPHQIHLGELHAILRRQEEFYPFLKENREKIEKILTFRIPYYVGPLARGNSRFAWMTRKSEETITPWNFEEVVDKGASAQAFIERMTNFDKNLPNEKVLPKHSLLYEYFTVYNELTKVKYVTEGMRKPEFLSGEQKEEIVDLLFKTNRKVTVKQLKEDYFKKIECFDSVEISGVEDRFNASLGTYHDLLKIIKDKDFLDNEENEDILEDIVLTLTLFEDREMIEERLEKYAHLFDKKVLKQLKRRRYTGWGRLSRKLINGIRDKQSGKTILDFLKSDGFANRNFMQLIHDDSLTFKEEIQKAQVIGQGDSLHEQIANLAGSPAIKKGILQTVKIVDELVKVMGRHKPENIVIEMARENQTTQKGQKNSRERMKRIEEGIKELGSQILKEHPVENTQLQNEKLYLYYLQNGRDMYVDQELDINRLSDYDVDHIVPQSFLKDDSIDNKVLTRSDKARGKSDNVPSEEVVKKMKNYWRQLLNAKLITQRKFDNLTKAERGGLSELDKAGFIKRQLVETRQITKHVAQILDSRFNTEYDENDKLIREVKIITLKSKLVSDFRKDFQFYKVREINNYHHAHDAYLNAVVGTALIKKYPKLESEFVYGDYKVYDVRKMIAKSEQEIGKATAKYFFYSNIMNFFKTEITLANGEIRKRPLIETNEETGEIVWDKGKDFATVRKVLSMPQVNIVKKTEVQTGGFSKESILPKRNSDKLIARKKDWDTKKYGGFDSPTVAYSVLVVAKVEKGKSKKLKTVKELVGITIMERSSFEKNPVDFLEAKGYKNVQKDLIIKLPKYSLFELENGRKRLLASAGELQKGNELALPQKYVTLLYLASHYEKLKGSSEDNEKKLEFVEQHRHYFDEIIEQISEFSERYILADKNLEKILSLYDEFEDYSIEELAENFIHLFTFTSLGAPAAFKFFDTTIDRKRYTSTTEILDATLIHQSITGLYETRIDLSQLGGD

SEQ ID NO: 131 - protein, 1368 aa, synthetic construct
MDKKYSIGLDIGTNSVGWAVVTDEYKVPSKKFKVLGNTDRHSIKKNLIGALLFDSGETAEATRLKRTARRRYTRRKNRIRYLQEIFAEEMAKVDDSFFHRLEESFLVEEDKRNERHPIFGNIVDEVAYHEKYPTIYHLRKKLADSDEKADLRLVYLALAHIIKFRGHFLIEGDLNAENTDVQKLFEQLVETYNQLFEESPLDEEKVDAKAILTEKLSKSRRLENLIAQFPGEKKNGLFGNLLALSLGLTPNFKSNFDLSEDAKLQFSKDTYDEDLEELLGQIGDEYADLFLAAKNLYDAILLSGILTVNDESTKAPLSASMVKRYDEHHQDLTLLKKFIRQQLPEKYKEIFFDQSKNGYAGYIDGGASQEEFYKYLKPILEKIDGSEEFLDKIEREDFLRKQRTFDNGSIPHQIHLQELHAILRRQEKYYPFLKENQEKIEKILTFRIPYYVGPLARGNSRFAWLSRKSDETITPWNFDEVVDKEASAQAFIERMTNFDKNLPNEKVLPKHSLLYEKFTVYNELTKVKYVTEGMRKPEFFSGEQKQEIFDLLFKKNRKVTKKQLKEYLFKEFECFDSVEISGVEDRFNASLGTYHDLLKIIKDKDFLDNEANEEILEDIILTLTLFEDREMIKKRLKKYADLFDKKVLKQLKRRRYTGWGRLSAKLINGIRDKQSGKTILDYLIDDGFANRNFMQLIHDDSLSFKEEIEKAQVIGDGESLHEVIANLAGSPAIKKGILQSLKIVDELVKVMGRHAPENIVIEMARENQTTQKGQKNSRERMKRLEEAIKELGSNILKEHPVENTQLQNDKLYLYYLQNGKDMYTGEELDIDRLSDYDVDHIVPQSFLKDDSIDNRVLVSSAKARGKSDNVPSEEVVKKMKPYWKQLLDAKLITQRKFDNLTKAERGGLTELDKAGFIKRQLVETRQITKHVAQILDSRFNTKYDENDKLIRDVKIITLKSKLVSQFRKDFELYKVREINNYHHAHDAYLNAVVGTALIKKYPKLESEFVYGDYKVYDVRKMIAKSEQEIGKATAKYFFYSNIMNFFKTEVKLANGEIRKRPLIEVNEETGEIAWDKEKDFATVKKVLSMPQVNIVKKTEVQTGGFSKESILPKRDSDKLIARKKDWDTKKYGGFDSPTVAYSVLVIAKVEKGKAKKLKTVKELVGITIMERSAFEKNPVAFLEAKGYKNIKKDLIIKLPKYSLFELENGRKRLLASAGELQKGNELALPNKYVTLLYHASHYEKLKGSPEDNEEKQLYVEQHKDYFDEILEQISEFSKRYILADANLEKIKKLYEKNRDLSIEELAESFINLLTFTALGAPAAFKFFDTTIDRKRYTSTKEILNATLIHQSITGLYETRIDLSKLGGD

SEQ ID NO: 132 - protein, 1368 aa, synthetic construct
MKKKYSIGLDIGTNSVGWAVITDEYKVPSKKFKVLGNTDRQSIKKNLIGALLFDSGETAEATRLKRTARRRYTRRKNRIRYLQEIFAEEMSKVDDSFFHRLEESFLVEEDKKHERHPIFGNIVDEVAYHEDYPTIYHLRKKLADSTEKADLRLVYLALAHMIKFRGHFLIEGDLNSENSDVDKLFIQLVQTYNQLFEENPINESHVDAKAILSAKLSKSRRLENLIAQFPNEKKNGLFGNLIALSLGLTPNFKSNFQLSEDAKLQLSKDTYDEDLENLLAQIGDQYADLFLAAKNLSDAILLSDILTVNDESTKAPLSASMIKRYDEHHQDLTLLKALVREQLPEKYKEIFFDQSKNGYAGYIDGGASQEEFYKYIKPILEKMDGSEELLTKINREDFLRKQRTFDNGSIPHQIHLQELHAILRRQEKYYPFLKENQEKIEKILTFRIPYYVGPLARGNSRFAWMSRKSEETITPWNFEEVVDKEASAQAFIERMTNFDKNLPEEKVLPKHSLLYEKFTVYNELTKVKYVTEGMGKPEFLSGEQKQEIVDLLFKKNRKVTVKQLKEDLFKKIDCFDSVEISGVEDRFNASLGTYHDLLKIIKDKEFLDNEENEKILEDIVLTLTLFEDREMIEERLKKYADLFDKKVLKQLKRRRYTGWGRLSKKLINGIRDKQSGKTILDFLKDDGFANRNFMQLIHDDSLTFKEEIQKAQVEGQSDSLHEQIADLAGSPAIKKGILQSVKIVDELVKVMGRHKPENIVIEMARENQTTQKGQKNSRERMKRLEEGIKELGSQILKEHPVENTQLQSEKLYLYYLQNGKDMYTGEELDIDRLSDYDVDHIIPQSFIKDDSIDNKVLTSSEKARGKSDDVPSEEVVKKMKSYWRKLLKAKLISQRKFDNLTKAERGGLSELDKAGFIKRQLVETRQITKHVAQILDSRFNTEYDENDKLIRDVKIITLKSKLVSDFRKDFQFYKVREINDYHHAHDAYLNAVVGTALIKKYPKLESEFVYGDYKVYDVRKMIAKSEQEIGKATAKMFFYSNIMNFFKTEITLANGEIRKRPLIETNEETGEIVWDKEKDFATVRKVLSMPQVNIVKKTEVQTGGFSKESILPKRESDKLIARKKDWDPKKYGGFDSPTVAYSVLVVAKVEKGKSKKLKTVKELVGITIMERSSFEKNPVAFLEKKGYKNVQKDLIIKLPKYSLFELENGRKRLLASAGELQKGNELALPQKYVTLLYHAKHYEKLKGSPEDNEKHREYVEQHKDYFDEILDQIEEFSKRYILADKNLDKILSLYSKNEDAPIEELAESFINLFTFTALGAPAAFKFFGTTIDRKRYTSTKEILDATLIHQSITGLYETRIDLSKLGGD

SEQ ID NO: 133 - protein, 1368 aa, synthetic construct
MDKKYSIGLDIGTNSVGWAVITDEYKVPSKKFKVLGNTDRHSIKKNLIGALLFDSGETAEATRLKRTARRRYTRRKNRIRYLQEIFAEEMAKVDDSFFHRLEESFLVEEDKRNERHPIFGNIVDEVAYHEKYPTIYHLRKKLADSDEKADLRLIYLALAHMIKFRGHFLIEGDLNADNSDVQKLFIQLVQTYNQLFEENPLNEETVDAKAILTAKLSKSRRLENLIAQFPGEKKNGLFGNLIALSLGLTPNFKSNFDLAEDAKLQLSKDTYDEDLENLLAQIGDQYADLFLAAKNLSDAILLSGILTVNDESTKAPLSASMIKRYDEHHQDLTLLKKLVRQQLPEKYKEIFFDQSKNGYAGYIDGGASQEEFYKYLKPILEKVDGSEEFLDKIEREDFLRKQRTFDNGSIPHQIHLGELHAILRRQEKYYPFLKENREKIEKILTFRIPYYVGPLARGNSRFAWMTRKSDETITPWNFEEVVDKEASAQDFIERMTNFDKNLPNEKVLPKHSLLYEKFTVYNELTKVKYVTEGMRKPEFLSAEQKQEIVDLLFKKNRKVTVKQLKEYLFKEFECFDSVEISGVEDRFNASLGTYHDLLKIIKDKDFLDNEENEDILEDIVLTLTLFEDREMIEERLKKYADLFDDKVLKQLKRRRYTGWGRLSKKLINGIRDKQSGKTILDFLIDDGFANRNFMQLIHDDSLTFKEEIEKAQVSGQGESLHELIANLAGSPAIKKGILQSIKIVDELVKVMGRHKPENIVIEMARENQTTQKGQKNSRERMKRIEEGIKELGSQILKEHPVENTQLQNEKLYLYYLQNGRDMYVDQELDINRLSDYDVDHIVPQSFLKDDSIDNKVLTRSDKARGKSDNVPSEEVVKKMKNYWRQLLNAKLITQRKFDNLTKAERGGLSELDKAGFIKRQLVETRQITKHVAQILDSRFNTKYDENDKLIRDVKIITLKSKLVSDFRKDFQFYKVREINNYHHAHDAYLNAVVGTALIKKYPKLESEFVYGDYKVYDVRKMIAKSEQEIGKATAKYFFYSNIMNFFKTEITLANGEIRKRPLIETNEETGEIVWDKGKDFATVRKVLSMPQVNIVKKTEVQTGGFSKESILPKRDSDKLIARKKDWDTKKYGGFDSPTVAYSVLVVAKVEKGKAKKLKTVKELVGITIMERSSFEKNPVAFLEAKGYKNVKKDLIIKLPKYSLFELENGRKRLLASAGELQKGNELALPSKYVTLLYLASHYEKLKGSPEDNEQKQLFVEQHKDYFDEIIEQISEFSKRYILADANLEKIKSLYEKNRDKSIEELAENFIHLLTFTNLGAPAAFKFFDTTIDRKRYTSTKEILNATLIHQSITGLYETRIDLSQLGGD

SEQ ID NO: 134 - protein, 1368 aa, synthetic construct
MKKPYSIGLDIGTNSVGWAVITDDYKVPSKKMKVLGNTDRQSIKKNLLGALLFDSGETAEATRLKRTARRRYTRRKNRILYLQEIFAEEMNKVDDSFFHRLEDSFLVEEDKRGERHPIFGNIVEEVKYHEKFPTIYHLRKKLADSTEKADLRLVYLALAHIIKFRGHFLIEGDLNAENTDVQKLFKEFVEVYDQTFEESHLVEETIDAEMILTEKISKSRRLENLIEQFPGEKKNGLFGNLIALSLGLQPNFKSNFDLSEDAKLQFSKDTYDEDLENLLGQIGDEYADVFLAAKNLYDAILLSGILTVNDSSTKAPLSASMIKRYDEHHEDLTLLKDFVRENLPEKYKEIFFDESKNGYAGYIDGGTSQEEFYKYIKPILNKVDGSEYFLDKIDREDFLRKQRTFDNGSIPHQIHLYELHAILRRQEKFYPFLKENQEKIEKILTFRIPYYVGPLARGNSRFAWMSRKSDETITPWNFDEVVDKEASAEAFIERMTNNDLYLPDEKVLPKHSLLYEKFTVYNELTKVKYVTEGMGKAFFFDANQKQEIFDLLFKKNRKVTKKKLLEFLFKEFDEFRIVDISGVEKAFNASLGTYHDLLKIIKDKDFLDNPENEDILEDIILTLTLFEDREMIKERLSKYADLFDKKVLKKLKRRHYTGWGRLSAKLINGIRDKQSGKTILDYLIDDGFANRNFMQLIHDDSLSFKEEIQKAQVIGQTDSLHEVVANLAGSPAIKKGILQSVKIVDELVKVMGRYNPENIVIEMARENQTTAKGQRNSRERLKKLEEAIKELGSQILKEHPVENQQLQNDRLYLYYLQNGKDMYTGEELDIDNLSQYDVDHIIPQSFIKDDSIDNRVLVSSAKARGKSDNVPSIEVVKKMKSFWRKLLNAKLISQRKFDNLTKAERGGLTEDDKAGFIKRQLVETRQITKHVAQILDSRFNTETDENHKLIRKVKIITLKSKLVSDFRKDFGFYKVREINDYHHAHDAYLNAVVGKALIKKYPKLEPEFVYGDYPKYNSYKLIAKSEKEEGKATAKKFFYSNIMNFFKTEIKLADGTIRERPVIEVNEETGEIVWDKTKHFATVRKVLSMPQVNIVKKTEVQTGGFSKESILPKRDSDKLIARKKKWDTKKYGGFDSPTVAYSVLVVAKIEKGKNKKLKTVKELVGITIMERSRFEKDPVAFLEDKGYKNVQEDTIIKLPKYSLFELENGRKRLLASAGELQKGNELALPAHLVTLLYHAKRIEKLDESKEDKPKHREYVEQHRHEFDEILDQISEFSNRYILADKNLEKIESLYANNVSASIEELASSFINLLTFTALGAPADFKFFGGTIDRKRYTSTKECLNATLIHQSITGLYETRIDLSKLGGD

SEQ ID NO: 135 - protein, 1368 aa, synthetic construct
MKKKYSIGLDIGTNSVGWAVVTDEYKVPSKKFKVLGNTDRQSIKKNLLGALLFDSGETAEATRLKRTARRRYTRRKNRILYLQEIFAEEMNKVDDSFFHRLEESFLVEEDKRGERHPIFGNIVEEVAYHEKYPTIYHLRKHLADSDEKADLRLVYLALAHIIKFRGHFLIEGDLNAENTDVQELFKQFLQVYDLTFEEDHLSEETIDAEEILTEKVSKSRKLENLLAQFPGEKKNGLFGNLLKLSLGLQPNFKKNFNLSEDAKLQFSKDTYDEDLENLLGQIGDEYADLFVAAKNLYDAILLSGILTVDDLSTKAPLSASMIKRYDEHHQDLTKLKEFVRENLPEKYKEIFFDKSKNGYAGYIDGGASQEDFYKYLKKLLEKVAGAEYFLEKIEREDFLRKQRTFDNGSIPHQIHLQELHAILRRQGEYYPFLKENQEKIEKILTFRIPYYVGPLARGNSRFAWASRKSDETITPWNFDEVVDKEKSAEAFIERMTNNDKNLPEEKVLPKHSLLYEKFTVYNELTKVKYVTEQMGKSQFFDANMKQEIFDGLFKKERKVTKKKLLDFLDKEFDEFRIVDISGVEKAFNASLGTYHDLLKILKDKEFLDNPENEKILEDIVLTLTLFEDREMIKKRLRKYADLFTKKQLKKLERRRYTGWGRLSAKLINGIRDKQSGKTILDYLIDDGLANRNFMQLIHDDNLSFKDEIAKAQVIGQSDSLHEVIADLAGSPAIKKGILQSIKIVDELVKVMGRYEPENIVVEMARENQTTQKGQRNSRERLKRLEDALKELGSKILKEHPVENTQLQNDKLYLYYLQNGKDMYTGEELDIDNLSDYDVDHIIPQSFIKDDSIDNRVLVSSAEARGKSDDVPSIEVVKKMKPFWEKLLKAKLISQRKFDNLTKAERGGLTELDKAGFIKRQLVETRQITKHVAQILDERFNTEFDENNKLIRKVKIVTLKSKLVSNFRKEFGFYKVREINDYHHAHDAYLNAVVGKALIKKYPKLESEFVYGDYPVYNSYKMIAKSEQEIGKATAKYFFYSNIMNFFKTEITLANGEIRKRPLIETNGETGEIVWDKGRDFATVRKVLSMPQVNIVKKTEVQTGGFSKESILPKRNSDKLIARKKDWDPKKYGGFDSPTVAYSVLVVAKVEKGKSKKLKSVKELLGITIMERSSFEKNPIDFLEAKGYKEVKKDLIIKLPKYSLFELENGRKRMLASAGELQKGNELALPSKYVNFLYLASHYEKLKGSPEDNEQKQLFVEQHKHYLDEIIEQISEFSKRVILADANLDKVLSAYNKHRDKPIREQAENIIHLFTLTNLGAPAAFKYFDTTIDRKRYTSTKEVLDATLIHQSITGLYETRIDLSQLGGD

SEQ ID NO: 136 - protein, 1368 aa, synthetic construct
MDKPYSIGLDIGTNSVGWAVVTDEYKVPSKKFKVLGNTDRHSIKKNLIGALLFDSGETAEATRLKRTARRRYTRRKNRIRYLQEIFSEEMVKVDDSFFHRLEESFLVEEDKRHERHPIFGNIVEEVAYHEDYPTIYHLRKTLADSTEKADLRLVYLALAHIIKFRGHFLIEGDLDSENSDVQVLFKVLVQTYNILFEENHLSEETVDAKAILTDKVSKSRRLENLIKQFPGEKKNGLFGNIIALSLGLTPNFKSNFDLAEDAKLQFSKDTYDEDLENLLAQIGDQYADLFLAAKNLYDAILLSGILTVNTEITKAPLSASMIKRYDEHHQDLTLLKKFIRVQLPEKYKEIFFDQSKNGYAGYIDGGASQEDFYKYIKNILSKLDGTEYFLDKIEREDFLRKQRTFDNGSIPHQIHLQELRAILRRQEKFYPFLKENQEKIEKILTFRIPYYVGPLARGNSRFAWATRKSNETITPWNFEEVVDKEASAQAFIERMTNFDKNLPNEKVLPKHSLLYEKFTVYNELTKVKYVTEGMRKPAFLSSEQKKAIVDLLFKKNRKVTVKQLKEFLFKKIDCFDSVEISGVEDRFNASLGTYHDLLKIIKDKEFLDNEENEDILEDIVLTLTLFEDREMIEERLKKYADLFDKKVIKQLKRRRYTGWGRLSAKLINGIRDKQSGKTILDYLIDDGFANRNFMQLIHDDSLSFKEEIKKAQVIGQTDSLHQVIANLAGSPAIKKGILQTIKIVDELVKVMGRYAPENIVIEMARENQTTQKGQRNSRERLKRLEEAIKELGSSILKENPVENTQLQNDKLYLYYLQNGKDMYTGEELDIDRLSDYDVDHIIPQSFIKDDSIDNRVLTSSEKARGKSDDVPSEEVVKKMKSYWSKLLRAKLISQRKFDNLTKAERGGLSELDKAGFIKRQLVETRQITKHVAQILDSRFNTKYDENDKLIRTVKIITLKSKLVSDFRKDFEFYKVREINDYHHAHDAYLNAVVGTALIKKYPKLESEFVYGDYKVYNSYKMIAKSEQEIGKATAKYFFYSNIMNFFKSDITLANGEIRKRPLIETNEETGEIAWNKTKDFATVKKVLSMPQVNIVKKTEVQTGGFSKESILPKRESDKLIARKKDWDPKKYGGFDSPTVAYSVLVVADVEKGKAKKLKTVKELVGITIMERSSFEKDPVDFLESKGYQNIQKDNIIKLPKYSLFELENGRKRLLASAGELQKGNELALPAKYVTLLYHASHYEKLKESPEDNEKKLRYVEEHREEFDEILDQIEEFSERYILADKNLEKILELYAKNENASISELASSFINLFTFTALGAPAAFKFFGSTIDRKRYTSTKEILNATLIHQSITGLYETRIDLSQLGGD

SEQ ID NO: 137 - protein, 1368 aa, synthetic construct
MDKKYSIGLDIGTNSVGWAVITDEYKVPSKKFKVLGNTDRHSIKKNLIGALLFDSGETAEATRLKRTARRRYTRRKNRICYLQEIFSNEMAKVDDSFFHRLEESFLVEEDKRGERHPIFGNIVDEVAYHEKYPTIYHLRKHLADSTEKADLRLIYLALAHMIKFRGHFLIEGDLNSENSDVQKLFEQFVQVYDRTFEESHLSEETVDAKAILTEKVSKSRRLENLIKQFPNEKKNGLFGNLIALSLGLQPNFKSNFDLSEDAKLQFSKDTYDEDLENLLGQIGDQYADLFVAAKNLYDAILLSGILTVNDESTKAPLSASMIKRYDEHHQDLTLLKAFVRKQLPEKYKEIFFDESKNGYAGYIDGGASQEEFYKYIKPILSKIDGSEYFLEKIEREDFLRKQRTFDNGSIPHQIHLGELHAILRRQEEYYPFLKENQEKIEKILTFRIPYYVGPLARGNSRFAWMSRKSDETITPWNFEEVVDKEASAQAFIERMTNNDKNLPEEKVLPKHSLLYEKFTVYNELTKVKYVTEGMGKPEFFDAEQKQEIFDLLFKKNRKVTKKKLLEFLFKEFEEFRIVDISGVEDAFNASLGTYHDLLKIIKDKEFLDNEENEDILEDIILTLTLFEDREMIEKRLSKYADLFDKKVLKKLKRRRYTGWGRLSAKLINGIRDKQSGKTILDYLIDDGFANRNFMQLIHDDSLSFKEEIKKAQVIGQSDSLHEHIANLAGSPAIKKGILQTVKVVDELVKVMGRHKPENIVIEMARENQTTQKGQRNSRERLKRLEEAIKELGSQILKEHPVDNTQLQNDKLYLYYLQNGKDMYTGEELDIDRLSDYDVDHIIPQSFIKDDSIDNRVLTSSAKARGKSDDVPSEEVVKKMKSYWEQLLNAKLISQRKFDNLTKAERGGLSELDKAGFIKRQLVETRQITKHVAQILDSRMNTKYDENDKLIREVKVITLKSKLVSDFRKDFQFYKVREINNYHHAHDAYLNAVVGTALIKKYPKLESEFVYGDYKVYDVRKMIAKSEQEIGKATAKYFFYSNIMNFFKTEITLANGEIRKRPLIETNGETGEIVWDKGRDFATVRKVLSMPQVNIVKKTEVQTGGFSKESILPKRDSDKLIARKKDWDTKKYGGFDSPTVAYSVLVVADIEKGKAKKLKTVKELVGITIMERSSFEKNPVAFLEAKGYKNIQEDTIIKLPKYSLFELENGRKRLLASAGELQKGNELALPQKYVTLLYHAKRYEKLKEKEEDNEKHLEYVEQHREEFDEILDQISEFAERYILADKNLEKIQKLYEKNESYSISELASSFINLLTFTALGAPAAFKFFGTTIDRKRYTSTKEILNATLIHQSITGLYETRIDLSKLGGD

SEQ ID NO: 138 - protein, 1368 aa, synthetic construct
MDKKYSIGLDIGTNSVGWAVITDEYKVPSKKFKVLGNTDRQSIKKNLLGALLFDSGETAEATRLKRTARRRYTRRKNRIRYLQEIFSEEMVKVDDSFFHRLEESFLVEEDKKYERHPIFGNIVDEVAYHEKYPTIYHLRKKLADSTEKADLRLIYLALAHIIKFRGHFLIEGDLNSENSDVDKLFHQLVQTYNQLFEENPINEEGVDAKAILSERLSKSRRLENLIAQFPGEKKNGLFGNLIALSLGLTPNFKSNFDLAEDAKLQLSKDTYDEDLENLLAQIGDQYADLFLAAKNLSDAILLSGILTVNDESTKAPLSASMIKRYDEHHQDLTLLKALVRKQLPEKYKEIFFDKSKNGYAGYIDGGASQEEFYKYIKPILEKMDGTEEFLAKIEREDFLRKQRTFDNGSIPHQIHLGELHAILRRQEEFYPFLKENQEKIEKILTFRIPYYVGPLARGNSRFAWMTRKSEETITPWNFEEVVDKEASAESFIERMTNFDKNLPNEKVLPKHSLLYEYFTVYNELTKVKYVTEGMGKPEFFSAKQKQEIVDLLFKKNRKVTVKQLKEFLFKKIECFDIVEISGVEDSFNASLGTYHDLLKIIKDKDFLDNEENEDILEDIVLTLTLFEDREMIEKRLSKYADLFDKKVLKQLKRRRYTGWGRLSRKLINGIRDKQSGKTILDFLKSDGFANRNFMQLIHDDSLTFKEEIEKAQVKGQGDSLHEQIANLAGSPAIKKGILQSVKIVDELVKVMGRHKPENIVIEMARENQTTQKGQKNSRERMKRLEEGIKELGSQILKEHPVENTQLQNEKLYLYYLQNGKDMYTGDELDIDRLSDYDVDHIIPQSFIKDDSIDNKVLTSSAKARGKSDNVPSEEVVKKMKSYWRRLLKAKLISQRKFDNLTKAERGGLSELDKAGFIKRQLVETRQITKHVAQILDSRFNTEFDENDKLIRDVKIITLKSKLVSDFRKDFQFYKVREINDYHHAHDAYLNAVVGTALIKKYPKLESEFVYGDYKVYDSRKMIAKSEQEIGKATAKMFFYSNIMNFFKSEIKLADGEIRKRPLIETNEETGEIVWDKEKDFATVRKVLSMPQVNIVKKTEVQTGGFSKESILPKRKSDKLIARKKDWDPKKYGGFDSPTVAYSVLVVAKIEKGKKKKLKTVKELVGITIMERSSFEKNPVAFLEAKGYKNVQKDLIIKLPKYSLFELENGRKRLLASAGELQKGNELALPQKYVTFLYLASHYEKLKGSPEDEEIKKEYVEQHRHYFDEILEQISEFSERYILADKNLEKILSLYSKNRDLSISEQAESFINLFTFTALGAPAAFKFFGGTIDRKRYTSTKEILNATLIHQSITGLYETRIDLSQLGGD

SEQ ID NO: 139 - protein, 1368 aa, synthetic construct
MKKPYSIGLDIGTNSVGWAVVTDEYKVPSKKFKVLGNTDRSSIKKNLLGALLFDSGETAEATRLKRTARRRYTRRKNRILYLQEIFAEEMNKVDDSFFHRLEESFLVEEDKRGERHPIFGNIVEEVAYHEKYPTIYHLRKHLADSTEKADLRLVYLALAHIIKFRGHFLIEGDLNSENTDVQKLFKKFVEVYDRTFEESHLSEETVDAESILTEKLSKSRKLENLIKQFPNEKKNGLFGNLIALSLGLQPNFKSNFNLSEDAKLQFSKDTYDEDLENLLGQIGDEYADLFVAAKNLYDAILLSGILTVNDESTKAPLSASMIKRYDEHHQDLTLLKKFIRENLPEKYKEIFFDESKNGYAGYIDGGASQEEFYKYLKNLLSKIDGSEYFLDKIEREDFLRKQRTFDNGSIPHQIHLQELHAILRRQGEYYPFLKENQEKIEKILTFRIPYYVGPLARGNSRFAWASRKSDETITPWNFDEVIDKEASAEAFIERMTNNDKNLPNEKVLPKHSLLYEKFTVYNELTKVKYVTEGMGKAEFFDANMKQEIFDGLFKKNRKVTKKKLLEFLDKEFDEFRIVDISGVEKAFNASLGTYHDLLKIIKDKDFLDNEENEDILEDIVLTLTLFEDREMIKKRLSKYADLFDKKVLKKLERRRYTGWGRLSAKLINGIRDKQSGKTILDYLIDDGFANRNFMQLIHDDNLSFKEEIAKAQVIGDSDSLHEVIANLAGSPAIKKGILQSLKIVDELVKVMGRHNPENIVIEMARENQTTQKGQRNSRERLKRLEEAIKELGSNILKEHPVENTQLQNDKLYLYYLQNGKDMYTGEELDIDRLSDYDVDHIIPQSFIKDDSIDNRVLTSSAKARGKSDDVPSEEVVKKMKSFWSKLLDAKLISQRKFDNLTKAERGGLTELDKAGFIKRQLVETRQITKHVAQILDERFNTEFDENNKLIRKVKIITLKSKLVSNFRKEFELYKVREINDYHHAHDAYLNAVVGKALIKKYPKLESEFVYGDYPVYNSYKLIAKSDQEIGKATAKMFFYSNIMNFFKSDIKLADGTIIERPDIEVNEETGEIAWDKTKHIATVKKVLSMPQVNIVKKTEVQTGGFSKESILPKRNSDKLIARKKDWDTKKYGGFDSPTVAYSVLVVADIEKGKSKKLKTVKELVGITIMERSRFEKNPVAFLEDKGYQNIQEDNIIKLPKYSLFELENGRKRLLASAGELQKGNELALPNKYVTLLYHAKHYEKLKEKKEDIEKHLEYVEEHRDEFDEILDQISEFSKRYILADKNLEKIEELYEKNEDASIEELASSFINLLTFTALGAPAAFKFFGKTIDRKRYTSTTEILNATLIHQSITGLYETRIDLSKLGGD

SEQ ID NO: 140 - protein, 1368 aa, synthetic construct
MDKPYSIGLDIGTNSVGWAVITDEYKVPSKKFKVLGNTDRHSIKKNLLGALLFDSGETAEATRLKRTARRRYTRRKNRIRYLQEIFAEEMSKVDDSFFHRLEESFLVEEDKRGERHPIFGNIVDEVAYHEKYPTIYHLRKHLADSTEKADLRLVYLALAHIIKFRGHFLIEGDLDAENTDVQKLFKKFVQVYDKTFEESHLSEQTVDAESILTDKLSKSRKLENLIKLFPNEKKNGLFGNLIALSLGLQPNFKTNFELSEDAKLQFSKDTYEEDLENLLGQIGDEYADLFLAAKNLYDAILLSGILTVNTEITKAPLSASMVKRYDEHHQDLTKLKAFIREQLPEKYKEIFFDESKNGYAGYIDGGAKQEEFYKYLKNLLSKLDGSEYFLDKIEREDFLRKQRTFDNGSIPHQIHLQELHAILRRQGEYYPFLKENQEKIEKILTFRIPYYVGPLARGNSRFAWASRKSDETITPWNFEEVIDKEKSAEAFIERMTNFDKNLPEEKVLPKHSLLYEKFTVYNELTKVKYITEGMRKPAFFDANQKQEIFDLLFKKNRKVTKKKLKEFLFKEFDEFRIVDISGVEKAFNASLGTYHDLLKIIKDKEFLDNEENEDILEDIVLTLTLFEDREMIEQRLSKYADLFDKKVLKKLERRRYTGWGRLSAKLINGIRDKQSGKTILDYLIDDGFANRNFMQLIHDDSLSFKEEIQKAQVIGQSDSLHQVIAELAGSPAIKKGILQSLKIVDELVKVMGRYNPENIVIEMARENQTTQKGQRNSRERLKRLEESIKELGSKILKEHPVDNTQLQNDKLYLYYLQNGKDMYTGEELDIDRLSDYDVDHIIPQSFIKDDSIDNRVLTSSAKARGKSDDVPSEEVVKKMKPFWNQLLNAKLISQRKFDNLTKAERGGLSELDKAGFIKRQLVETRQITKHVAQILDERFNTKYDENDKLIRKVKIITLKSKLVSQFRKEFELYKVREINDYHHAHDAYLNAVVGKALIKKYPKLESEFVYGDYPVYNSYKMIAKSEQEIGKATAKYFFYSNIMNFFKTKVTLANGEIRKRPLIETNEETGEIVWDKEKDIATVRKVLSMPQVNIVKKTEVQTGGFSKESILPKRDSDKLIARKKDWDTKKYGGFDSPTVAYSVLVIADVEKGKTKKLKTVKELVGITIMERSRFEKNPVAFLEDKGYKNIQKDNIIKLPKYSLFELENGRKRLLASAGELQKGNELALPQKYVTLLYHAKHYEKLKESPEDNEKHLEYVQKHRDEFDEILDQISEFSKRYILADKNLEKILELYSQNADADIEELASSFINLLTFTALGAPAAFKFFDKKIDRKRYTSTTEILNATLIHQSITGLYETRIDLSQLGGD

SEQ ID NO: 141 - protein, 1368 aa, synthetic construct
MDKPYSIGLDIGTNSVGWAVITDEYKVPSKKFKVLGNTDRHSIKKNLLGALLFDSGETAEATRLKRTARRRYTRRKNRICYLQEIFAEEMSKVDDSFFHRLEESFLVEEDKRDERHPIFGNIVDEVAYHEKYPTIYHLRKKLADSTEKADLRLIYLALAHIIKFRGHFLIEGDLDSENTDVQKLFKALVQTYDQTFEESHLQEETVDAESILTAKISKSRRLENLIKQYPNEKKNGLFGNLIALSLGLQPNFKTNFALAEDAKLQFSKDTYDEDLENLLAQIGDEYADLFTAAKNLYDAILLSGILTVNTEITKAPLSASMIKRYDEHHQDLTLLKAFIREQLPEKYKEIFFDVTKNGYAGYIDGGASQEEFYKYLKNILEKVDGSEYFLDKIEREDFLRKQRTFDNGSIPHQIHLQELKAILRRQEEYYPFLKENQEKIEKILTFRIPYYVGPLARGNSRFAWMSRKSEETITPWNFEEVVDKESSAEAFIERMTNYDKNLPEEKVLPKHSLLYEEFTVYNELTKVKYVTEGMRKPAFFDAEQKKEIVDGLFKKNRKVTKKKLKEFLFKEIDCFRIVEISGVEKAFNASLGTYHDLLKIIKDKDFLDNEENEKILEDIVLTLTLFEDREMIEQRLSKYADLFDKKVLKQLKRRRYTGWGRLSAKLINGIRDKQSGKTILDYLIDDGFANRNFMQLIHDDSLSFKEEIQKAQVIGQGDSLHQTIAELAGSPAIKKGILQSLKIVDELVKVMGRHNPENIVIEMARENQTTQKGQRNSRERLKRLEESIKELGSQILKEHPVENTQLQNDKLYLYYLQNGKDMYTGEELDIDNLSDYDVDHIIPQSFIKDDSIDNRVLTSSKKARGKSDNVPSEEVVKKMKSFWNRLLDAKLISQRKFDNLTKAERGGLTELDKAGFIKRQLVETRQITKHVAQILDSRFNTKYDENDKLIRTVKIITLKSKLVSNFRKEFGFYKVREINDYHHAHDAYLNAVVGTALIKKYPKLESEFVYGDYKVYDSYKMIAKSEQEIGKATAKYFFYSNIMNFFKTDITLANGEIRKRPLIETNEETGEIVWDKQKDFATVRKVLSMPQVNIVKKTEVQTGGFSKESILPKRNSDKLIARKKDWDTKKYGGFDSPTVAYSVLVVADIEKGKAKKLKTVKELVGITIMERSSFEKNPIAFLENKGYQNIQKDNIIKLPKYSLFELENGRKRLLASAGELQKGNELALPNKYVTLLYHAKNYEKLKGSPEDNPKHLEYVEQHRSEFDEIFDQISEFSQRYILADKNLEKILELYEQNRERDISELASSFINLLTFTALGAPAAFKFFGTTIDRKRYTSTTEILNATLIHQSITGLYETRIDLSQLGGD

SEQ ID NO: 142 - protein, 1368 aa, synthetic construct
MDKKYSIGLDIGTNSVGWAVVTDEYKVPSKKFKVLGNTDRKSIKKNLLGALLFDSGETAEATRLKRTARRRYTRRKNRIRYLQEIFAEEMAKVDDSFFHRLEESFLVEEDKRHERHPIFGNIVEEVAYHEKYPTIYHLRKKLADSDEKADLRLVYLALAHIIKFRGHFLIEGDLDSENTDVQKLFKELVETYNQLFEESPLEEEEVDAEAILTEKLSKSRRLENLIAQFPGEKKNGLFGNLLALSLGLTPNFKSNFDLEEDAKLQFSKDTYDEDLEELLGQIGDEYADLFLAAKNLYDAILLSGILTVKDESTKAPLSASMVKRYDEHHQDLTLLKQFIRKQLPEKYKEIFFDQSKNGYAGYIDGGASQEEFYKYLKKILEKIDGSEEFLDKIEREDFLRKQRTFDNGSIPHQIHLQELHAILRRQEKYYPFLKENQEKIEKILTFRIPYYVGPLARGNSRFAWLSRKSDETITPWNFDEVVDKEASAEAFIERMTNFDKNLPEEKVLPKHSLLYEKFTVYNELTKVKYVTEGMRKPEFFDAEQKQEIVDLLFKENRKVTKKQLKEYLFKKFECFDIVEISGVEDRFNASLGTYHDLLKILFDKDFLDNEANEEILEDIILTLTLFEDREMIKKRLEKYSDLFDKKQLKKLERRRYTGWGRLSKKLINGIRDKQTGKTILDYLIDDGFANRNFMQLIHDDSLTFKEEIEKAQVIGDGESLHEVIANLAGSPAIKKGILQSLKIVDEIVKVMGRHNPENIVIEMARENQTTQKGQKNSRERMKRIEEGIKELGSQILKEHPVENTQLQNEKLYLYYLQNGRDMYVDQELDINRLSDYDVDHIVPQSFLKDDSIDNKVLTRSDKARGKSDNVPSEEVVKKMKNYWRQLLNAKLITQRKFDNLTKAERGGLSELDKAGFIKRQLVETRQITKHVAQILDSRFNTKYDENDKLIRDVKIITLKSKLVSDFRKDFELYKVREINNYHHAHDAYLNAVVGTALIKKYPKLESEFVYGDYKVYDVRKMIAKSEQEIGKATAKYFFYSNIMNFFKTEVTLANGEIRKRPLIETNEETGEIVWDKEKDFATVRKVLSMPQVNIVKKTEVQTGGFSKESILPKRDSDKLIARKKDWDTKKYGGFDSPTVAYSVLVIADVEKGKAKKLKTVKELVGITIMERSAFEKDPIAFLEDKGYKNIKKDNIIKLPKYSLFELENGRKRLLASAGELQKGNELALPQHYVELLYHASHYEKLKGKPEDNEEKQLYVEQHKDYFDEILDQISEFSKRYILADANLEKIKKLYEKNKDASIEELAENFIHLLTFTALGAPAAFKFFGKTIDRKRYTSTKEILNATLIHQSITGLYETRIDLSKLGGD

SEQ ID NO: 143 - protein, 1368 aa, synthetic construct
MKKPYSIGLDIGTNSVGWAVVTDEYKVPSKKFKVLGNTDRQSIKKNLLGALLFDSGETAEATRLKRTARRRYTRRKNRILYLQEIFAEEMNKVDDSFFHRLEESFLVEEDKRGERHPIFGNIVEEVAYHEKYPTIYHLRKELADSDEKADLRLVYLALAHMIKFRGHFLIEGDLDSENTDVQKLFKQFLEAYDNTFEESHLSEETVDIEEILTEKLSKSRKLENLLALFPNEKKNGIFGELLKLILGLQPNFKKNFGLSEDAKLQFSKDTYDEDLEELLGQIGDEYADLFVAAKNLYDAILLSGILTVDDLSTKAPLSASMVKRYDEHHQDLTLLKQFIRKQLPEKYKEIFFDKSKNGYAGYIDGGASQEDFYKYLKKLLEKIDGSEYFLDKIDREDFLRKQRTFDNGSIPHQIHLEELKAIIRRQGEYYPFLKENQEKIEKILTFRIPYYVGPLARGNSRFAWASRKSDETITPWNFDEVVDKEKSAEAFIERMTNNDKNLPTEKVLPKHSLLYEKFTVYNELTKVKYVTEQMGKAKFFDANMKQEIFDGLFKKYRKVTKKKLLEFLDKEFDEFRIVDISGVEKAFNASLGTYHDLLKIIKDKEFLDDEDNEKILEDIILTLTLFEDREMIRKRLEKYADLFDKKQLKKLERRRYTGWGRLSAKLINGIRDKQTGKTILDYLIDDGRSNRNFMQLIHDDSLSFKEEIAKAQLIGDSDSLHEVIADLAGSPAIKKGILQSLKIVDELVKVMGRYNPENIVVEMARENQTTQKGQRNSRERLKRLEEAIKNLGSDILKEYPVDNTQLQNDKLYLYYLQNGKDMYTGEELDIDNLSDYDVDHIIPQSFIKDDSIDNRVLVSSKKARGKSDDVPSEDVVNKMKPFWKKLLKAKLISQRKYDNLTKAERGGLTELDKAGFIKRQLVETRQITKHVAQILDERFNTEFDENNKLIRDVKIITLKSKLVSQFRKEFGLYKVREINDYHHAHDAYLNAVVGKALIKKYPKLESEFVYGDYPVYNSYKMIAKSEQEIGKATAKYFFYSNIMNFFKTEITLANGEIRKRPLIETNGETGEIVWDKGRDFATVRKVLSMPQVNIVKKTEVQTGGFSKESILPKRNSDKLIARKKDWDPKKYGGFDSPTVAYSVLVVAKVEKGKSKKLKSVKELLGITIMERSSFEKNPIDFLEAKGYKEVKKDLIIKLPKYSLFELENGRKRMLASAGELQKGNELALPSKYVNFLYLASHYEKLKGSPEDNEQKQLFVEQHKHYLDEIIEQISEFSKRVILADANLDKVLSAYNKHRDKPIREQAENIIHLFTLTNLGAPAAFKYFDTTIDRKRYTSTKEVLDATLIHQSITGLYETRIDLSQLGGD

SEQ ID NO: 144 - protein, 1368 aa, synthetic construct
MKKPYSIGLDIGTNSVGWAVVTDDYKVPAKKMKVLGNTDKEYIKKNLLGALLFDSGNTAEDRRLKRTARRRYTRRRNRILYLQEIFSEEMNKVDESFFHRLEDSFLVPEDKRGERHPIFGDLEEEVKYHEDFPTIYHLRKELADSPEKADLRLVYLALAHIIKYRGHFLIEGELDTRNNDIQKLFQEFLAVYDNTFENSSLSEQNVQVEEILTDKISKSAKKDRVLKLFPNEKSNGLFAEFLKLIVGNQADFKKHFELEEKAPLQFSKDSYDEDLEGLLGQIGDEYADLFLSAKKLYDAILLSGILTVTDVSTKAPLSASMIQRYVEHQEDLKKLKQFIRTNLPAKYNEVFNDKSKDGYAGYIDGKTNQEDFYKYLKKLLTKVAGSEYFLEKIEREDFLRKQRTFDNGSIPHQIHLQEMKAIIRRQAEYYPFLKENQDKIEKILTFRIPYYVGPLARGNSDFAWASRKSDEKITPWNFDDIIDKESSAEAFINRMTNYDLYLPEEKVLPKHSLLYEKFTVYNELTKVRYITEQMGETEFFDANMKQEIFDGLFKKYRKVTKKKLLNFLEKEFDEFRIVDITGLDKAFNASLGTYHDLLKILKDKEFLDDPANEEILEDIVQTLTLFEDREMIKKRLSKYSDLFDKKQLKKLERRHYTGWGRLSAKLINGIRDKQTRKTILDYLIDDGNSNRNFMQLINDDGLSFKEEIAKAQVIGESDNLKQVVQDLAGSPAIKKGILQSLKIVDELVKIMGGYNPESIVVEMARENQFTNRGRRNSQQRLKKLTDSIKELGSNILKEHPVDNSQLQNDRLFLYYLQNGKDMYTGEALDIDYLSQYDIDHIIPQAFIKDDSLDNRVLVSSAKARGKSDDVPSKDVVKKMKSFWNKLLDAKLISQRKFDNLTKAERGGLTDDDKAGFIKRQLVETRQITKHVARILDERFNTELDENNKKIRKVKIVTLKSNLVSNFRKEFELYKVREINDYHHAHDAYLNAVVAKALLGKYPKLEPEFVYGEYPKYNSHKYVSQTDEERNTATAKKFFYSNIMNFFKSDVKLADGSEVERPQIERNDETGEIVWDKTKHVEIVKKVLSYPQVNIVKKVEEQTGGFSKESILPKGNSDKLIPRKTKWDTKKYGGFDSPTVAYSVLVIADIEKGKSKKLKTVKELVGITIMEKKKFEKDPVAFLERKGYQNIQEENIIKLPKYSLFELENGRRRLLASAKELQKGNEIVLPNHLVKLLYHAKHIHSIDEKNEEIKKHLQYVKKHRQEFSELLDEVKDFSKKYVLAEKNLEKIEELYAKNEQASVEELANSFINLLTFTAMGAPATFKFFGTTIDRKRYTSTTEILNATLIHQSITGLYETRIDLSKLGED

SEQ ID NO: 145 - protein, 1368 aa, synthetic construct
MKKPYSIGLDIGTNSVGWAVVTDDYKVPSKKMKVLGNTDRQSIKKNLLGALLFDSGETAEATRLKRTARRRYTRRKNRILYLQEIFSEEMSKVDESFFHRLEDSFLVEEDKRNERHPIFGNIVDEVAYHEKFPTIYHLRKHLADSTEKADLRLVYLALAHIIKFRGHFLIEGDLDSENTDVQKLFKQFVQVYNKTFEESHLSEETVDAEAILTEKLSKSRKLENLLAQFPNEKKNGLFGNLIALSLGLQPNFKSNFELSEDAKLQFSKDTYDEDLDNLLGQIGDEYADVFVAAKNLYDAILLSGILTVNDLSTKAPLSASMIKRYEEHHEDLTKLKNFVRKNLPEKYKEIFFDKSKNGYAGYIDGGTSQEEFYKYIKKNLSKVDGSEYFLEKIDREDFLRKQRTFDNGSIPHQIHLGELHAILRRQEEYYPFLKENQEKIEKILTFRIPYYVGPLARGNSRFAWMTRKSDETITPWNFDEVVDKEASAQAFIERMTNNDLYLPTEKVLPKHSLLYEKFTVYNELTKVKYVTEGMGKTKFFDANQKKEIFDGLFKKNRKVTKKKLLNFLFKEFDEFRIVDISGVEDAFNASLGTYHDLLKIIKDKEFLDNEENEKILEDIVLTLTLFEDREMIKKRLLKYADLFDKKVLKKLERRHYTGWGRLSAKLINGIRDKQTGKTILDFLIDDGFANRNFMQLIHDDNLSFKEEIQKAQVIGQEDSLHEVVAELAGSPAIKKGILQSLKIVDELVKVMGRHAPENIVVEMARENQTTAKGQRNSRERLKRLEEAMKELGSSILKEHPVENSQLQNDRLYLYYLQNGKDMYTGEELDIDRLSDYDVDHIIPQSFIKDDSIDNRVLTSSAKARGKSDDVPSEEVVKKMKSFWYQLLNAKLISQRKFDNLTKAERGGLTEDDKAGFIKRQLVETRQITKHVAQILDERFNTEFDENDKLIRDVKIVTLKSKLVSNFRKEFQFYKVREINDYHHAHDAYLNAVVGKALIKKYPKLEPEFVYGDYPKYNSYKMFAKSEKERGKATAKMFFYSNIMNFFKTDIKLADGQIIKRPQIETNEETGEIVWDKGKDFATVKKVLSMPQVNIVKKTEVQTGGFSKESILPKRNSDKLIARKKGWDTKKYGGFDSPTVAYSVLVVADIEKGKAKKLKTVKELVGITIMERSRFEKNPVAFLEDKGYQNIRKDSIIKLPKYSLFELENGRKRLLASAGELQKGNELALPNKLVTLLYHAKNLEKLDEKDEDNPKHREYVNQHREEFKEIFQQISEFSKRYILADKNLEKILELYEKNENKSISELASSFINLLTFTALGAPAAFKFFDKTIDRKRYTSTKEILNATLIHQSITGLYETRIDLSKLGGD

SEQ ID NO: 146 - protein, 1368 aa, synthetic construct
MKKPYSIGLDIGTNSVGWAVITDDYKVPSKKMKVLGNTDRSSIKKNLLGALLFDSGETAEATRLKRTARRRYTRRKNRIRYLQEIFAEEMNKVDDSFFHRLEDSFLVEEDKRGERHPIFGNIVEEVAYHEKFPTIYHLRKYLADSTEKADLRLVYLALAHIIKFRGHFLIEGDLNPENTDVQKLFKKFVTTYDKTFEESHLSEETVDAEAILTEKLSKSRKLENLLKQFPKEKKNGLFGNLIALSLGLQPNFKSNFQLSEDAKLQFSKDTYDEDLENLLAQIGDEYADLFVAAKNLYDAILLSGILTVNDESTKAPLSASMIKRYEEHHEDLTLLKAFIRKQLPEKYKEIFFDKSKNGYAGYIDGGTSQEEFYKYLKPLLEKLDGSEYFLDKIEREDFLRKQRTFDNGSIPHQIHLKELHAILRRQAEYYPFLKENQEKIEKILTFRIPYYVGPLARGNSRFAWASRKSDETITPWNFDEVIDKEASAEAFIERMTNFDLYLPEEKVLPKHSLLYEKFTVYNELTKVKYVTEGMGESQFFDAELKQEIFDGLFKKYRKVTKKKLLEFLDKEFEEFRIVDISGVEKRFNASLGTYHDLLKIIKDKEFLDNPENEDILEDIVLTLTLFEDREMIEQRLQKYADLFDKKVLKKLERRHYTGWGRLSAKLINGIRDKQTGKTILDYLIDDGYANRNFMQLIHDDSLTFKEEIAKAQVIGNSDSLHEVVANLAGSPAIKKGILQSLKIVDELVKVMGRYAPENIVIEMARENQTTAKGQRNSRERLKRLEEAIKKLGSNILKEHPVENAQLQNDRLYLYYLQNGKDMYTGEELDINNLSDYDVDHIIPQSFIKDDSIDNRVLTSSKKARGKSDDVPSIEVVKKMKSFWSKLLNAKLISQRKFDNLTKAERGGLTEDDKAGFIKRQLVETRQITKHVAQILDSRFNTERDENNKLIRKVKIITLKSKLVSNFRKDFGLYKVREINDYHHAHDAYLNAVVGTALIKKYPKLEPEFVYGDYPKYNSYKMIRKSESERGKATAKMFFYSNIMNFFKTDIKLADGRIEERPVIEVNEETGEIVWDKGKHFATVKKVLSMPQVNIVKKTEVQTGGFSKESILPKRDSDKLIARKKKWDPKKYGGFDSPTVAYSVLVVADIEKGKSKKLKTVKELVGITIMERSRFEKNPIAFLESKGYKNIQEDNIIKLPKYSLFELENGRKRLLASAGELQKGNELALPNKLVTLLYHAKHIENLKEKPEDNEKKLEYVEQHRSEFDEILDQISEFSKRYILADKNLEKIEELYHKNNSKSIEELAESFINLFTFTALGAPAAFKFFGATIDRKRYTSTTECLNATLIHQSITGLYETRIDLSKLGGD

SEQ ID NO: 147 - protein, 1368 aa, synthetic construct
MDKKYSIGLDIGTNSVGWAVITDEYKVPSKKFKVLGNTDRHSIKKNLIGALLFDSGETAEATRLKRTARRRYTRRKNRICYLQEIFSNEMAKVDDSFFHRLEESFLVEEDKRNERHPIFGNIVDEVAYHEKYPTIYHLRKKLADSDEKADLRLIYLALAHMIKFRGHFLIEGDLNSDNSDVQKLFKQLVQVYNQLFEESPLNEETVDAKAILTEKLSKSRRLENLIAQFPGEKKNGLFGNLIALSLGLTPNFKSNFDLAEDAKLQFSKDTYDEDLENLLGQIGDEYADLFLAAKNLYDAILLSGILTVNDESTKAPLSASMVKRYDEHHQDLTLLKAFVRQQLPEKYKEIFFDQSKNGYAGYIDGGASQEEFYKYLKKILEKVDGSEEFLAKINREDFLRKQRTFDNGSIPHQIHLGELHAILRRQEKYYPFLKENREKIEKILTFRIPYYVGPLARGNSRFAWMTRKSDETITPWNFDEVVDKEASAQAFIERMTNFDKNLPDEKVLPKHSLLYEKFTVYNELTKVKYVTEGMRKPEFFSAEQKQEIVDLLFKKNRKVTKKQLKEYLFKEFECFDIVEISGVEDRFNASLGTYHDLLKIIFDKDFLDNEENEKILEDIVLTLTLFEDREMIKERLEKYADLFDDKQLKQLKRRRYTGWGRLSKKLINGIRDKQSGKTILDYLIDDGFANRNFMQLIHDDSLTFKEEIEKAQVSGQGDSLHEHIANLAGSPAIKKGILQTVKVVDELVKVMGRHKPENIVIEMARENQTTQKGQKNSRERMKRIEEGIKELGSQILKEHPVENTQLQNEKLYLYYLQNGRDMYVDQELDINRLSDYDVDHIVPQSFLKDDSIDNKVLTRSDKARGKSDNVPSEEVVKKMKNYWRQLLNAKLITQRKFDNLTKAERGGLSELDKAGFIKRQLVETRQITKHVAQILDSRMNTKYDENDKLIREVKVITLKSKLVSDFRKDFQFYKVREINNYHHAHDAYLNAVVGTALIKKYPKLESEFVYGDYKVYDVRKMIAKSEQEIGKATAKYFFYSNIMNFFKTEITLANGEIRKRPLIETNGETGEIVWDKGRDFATVRKVLSMPQVNIVKKTEVQTGGFSKESILPKRNSDKLIARKKDWDPKKYGGFDSPTVAYSVLVVAKVEKGKSKKLKSVKELLGITIMERSSFEKNPIDFLEAKGYKEVKKDLIIKLPKYSLFELENGRKRMLASAGELQKGNELALPSKYVNFLYLASHYEKLKGSPEDNEQKQLFVEQHKHYLDEIIEQISEFSKRVILADANLDKVLSAYNKHRDKPIREQAENIIHLFTLTNLGAPAAFKYFDTTIDRKRYTSTKEVLDATLIHQSITGLYETRIDLSQLGGD

SEQ ID NO: 148 - protein, 1368 aa, synthetic construct
MDKPYSIGLDIGTNSVGWAVVTDEYKVPSKKFKVLGNTGRKSIKKNLWGVLLFDSGETAEATRLKRTARRRYTRRKNRICYLQEIFSNEMAKVDDSFFHRLEESFLVEEDKKHERHPIFGNIVDEVAYHEKYPTIYHLRKKLVDSTDKADLRLIYLALAHMIKFRGHFLIEGDLNPDNSDVDKLFIQLVQTYNQLFEENPINASGVDAKAILSARLSKSRRLENLIAQLPGEKKNGLFGNLIALSLGLTPNFKSNFDLAEDAKLQLSKDTYDDDLDNLLAQIGDQYADLFLAAKNLSDAILLSDILRVNTEITKAPLSASMIKRYDEHHQDLTLLKALVRQQLPEKYKEIFFDQSKNGYAGYIDGGASQEEFYKFIKPILEKMDGTEELLVKLNREDLLRKQRTFDNGSIPHQIHLGELHAILRRQEDFYPFLKDNREKIEKILTFRIPYYVGPLARGNSRFAWMTRKSEETITPWNFEEVVDKGASAQSFIERMTNFDKNLPNEKVLPKHSLLYEYFTVYNELTKVKYVTEGMRKPAFLSGEQKKAIVDLLFKTNRKVTVKQLKEDYFKKIECFDSVEISGVEDRFNASLGTYHDLLKIIKDKDFLDNEENEDILEDIVLTLTLFEDREMIEERLKTYAHLFDDKVMKQLKRRRYTGWGRLSRKLINGIRDKQSGKTILDFLKSDGFANRNFMQLIHDDSLTFKEDIQKAQVSGQGESLHEQIANLAGSPAIKKGILQSIKIVDEIVKVMGRYAPENIVVEMARENQTTQKGQKNSRERMKRIEEGIKELGSQILKEHPVENTQLQNEKLYLYYLQNGRDMYVDQELDINRLSDYDVDHIVPQSFLKDDSIDNKVLTRSDKARGKSDNVPSEEVVKKMKNYWRQLLNAKLITQRKFDNLTKAERGGLTELDKAGFIKRQLVETRQITKHVAQILDERFNAEYDDNGKLIRDTKIVTLKSKLVSNFRKDFELYKIREVNNYHHAHDAYLNAVVGQALIKKYPKLESEFVYGDYPVYDVNKLIRKSNREIGKATEKMFFYSNIMNFFKSDVKLADGDVRKRPIVEVNEETGEIVWDKNKHLATIKKVLSMPQVNIVKKTEVQTGGFSKESILPKRNSDKLIARKKDWDPKKYGGFDSPTVAYSVLVVAKVEKGKSKKLKSVKELLGITIMERSSFEKNPIDFLEAKGYKEVKKDLIIKLPKYSLFELENGRKRMLASAGELQKGNELALPSKYVNFLYLASHYEKLKGSPEDNEQKQLFVEQHKHYLDEIIEQISEFSKRVILADANLDKVLSAYNKHRDKPIREQAENIIHLFTLTNLGAPAAFKYFDTTIDRKRYTSTKEVLDATLIHQSITGLYETRIDLSQLGGD

SEQ ID NO: 149 - protein, 1368 aa, synthetic construct
MKKKYSIGLDIGTNSVGWAVITDEYKVPSKKFKVLGNTDRQSIKKNLIGALLFDSGETAEATRLKRTARRRYTRRKNRIRYLQEIFAEEMAKVDDSFFHRLEESFLVEEDKKHERHPIFGNIVDEVAYHEKYPTIYHLRKKLVDSTEKADLRLIYLALAHMIKFRGHFLIEGDLNPENSDVDKLFIQLVQTYNQLFEENPINESGVDAKAILSAKLSKSRRLENLIAQLPGEKKNGLFGNLIALSLGLTPNFKSNFDLSEDAKLQLSKDTYDDDLENLLGQIGDQYADLFLAAKNLSDAILLSDILRVNTESTKAPLSASMIKRYDEHHQDLTLLKALVRQQLPEKYKEIFFDKSKNGYAGYIDGGASQEEFYKFIKPILEKMDGTEELLAKLNREDLLRKQRTFDNGSIPHQIHLGELHAILRRQEEFYPFLKENREKIEKILTFRIPYYVGPLARGNSRFAWMTRKSDETITPWNFEEVVDKGASAQSFIERMTNFDKNLPNEKVLPKHSLLYEYFTVYNELTKVKYVTEGMGKPEFLSGEQKKEIVDLLFKKDRKVTVKQLKEDYFKEIECFDSVEISGVEDRFNASLGTYHDLLKIIKDKDFLDNEENEDILEDIVLTLTLFEDREMIEERLKKYANLFDDKVMKQLKRRRYTGWGRLSRKLINGIRDKQSGKTILDFLKSDGFANRNFMQLIHDDSLTFKEAIQKAQVIGQGDSLHEQIANLAGSPAIKKGILQTVKVVDELVKVMGRHKPENIVIEMARENQTTQKGQKNSRERMKRIEEGIKELGSQILKEHPVENTQLQNEKLYLYYLQNGRDMYTGDELDINRLSDYDVDHIVPQSFLKDDSIDNKVLTRSKKARGKSDNVPSEEVVKKMKNYWRQLLKAKLITQRKFDNLTKAERGGLSELDKAGFIKRQLVETRQITKHVAQILDSRMNTKRDENDKLIRDVKVITLKSKLVSDFRKDFQFYKVREINNYHHAHDAYLNAVVGTALIKKYPKLESEFVYGDYKVYDVRKMIAKSEQEIGKATAKYFFYSNIMNFFKTEIKLANGEIRKRPLIETNEETGEIVWDKERDFATVRKVLSMPQVNIVKKTEVQTGGFSKESILPKRDSDKLIARKKDWDPKKYGGFDSPTVAYSVLVVAKIEKGKSKKLKTVKELLGITIMERSSFEKDPVAFLEDKGYKNVKKDLIIKLPKYSLFELENGRKRMLASAGELQKGNELALPSKYVNFLYLASHYEKLKGSPEDNEQKQLYVEQHKHYLDEIIDQISEFSERVILADKNLEKVLSAYNEIRDKSIREQAENIIHLFTLTNLGAPAAFKYFDTTIDRKRYTSTKEVLDATLIHQSITGLYETRIDLSQLGGD

SEQ ID NO: 150 - protein, 1368 aa, synthetic construct
MKKPYSIGLDIGTNSVGWAVVTDEYKVPSKKFKVLGNTDRSSIKKNLLGALLFDSGETAEATRLKRTARRRYTRRKNRILYLQEIFAEEMNKVDDSFFHRLEESFLVEEDKRGERHPIFGNIVEEVAYHEEYPTIYHLRKYLADSTEKADLRLVYLALAHIIKFRGHFLIEGDLDAENTDVQKLFYDFVQAYNNTFEESHLSEATVDASEILTEKISKSRRLENLLKNFPTEKKNGFFGNLVALSLGLQPNFKTNFELSEDAKLQFSKDTYDEDLENLLGQIGDEYADLFVAAKNLYDAILLSGILTVNDESTKAPLSASMIKRYDEHHQDLTQLKKFIREKLPEKYKEIFFDESKNGYAGYIDGGASQEEFYKYLKNLLSKIDGSEYFLDKIEREDFLRKQRTFDNGSIPHQIHLQELHAILRRQGEYYPFLKENQEKIEKILTFRIPYYVGPLARGNSRFAWASRKSDETITPWNFDEVVDKESSAEAFIERMTNNDKNLPNEKVLPKHSLLYEKFTVYNELTKVKYVTEQMGKAKFFDANQKQEIVDLLFKKERKVTKKKLLDFLFKEFDEFRIVDISGVEKAFNASLGTYHDLLKILKDKDFLDNEENEDILEDIVLTLTLFEDREMIKQRLQKYEDLFDKKQLKKLERRRYTGWGRLSAKLINGIRDKQTGKTILDYLIDDGRANRNFMQLIHDDNLSFKEEIAKAQVIGESDSLHQVIADLAGSPAIKKGILQSLKIVDELVKVMGRYNPENIVVEMARENQTTQKGQRNSRERLKRLEESIKKLGSKILKEHPVDNTQLQNDKLYLYYLQNGKDMYTGEELDIDRLSDYDVDHIIPQSFIKDDSIDNRVLTSSAKARGKSDDVPSIDVVKKMKPFWQKLLDAKLISQRKFDNLTKAERGGLTELDKAGFIKRQLVETRQITKHVAQILDSRFNTEFDENNKLIRKVKIITLKSKLVSNFRKEFELYKVREINDYHHAHDAYLNAVVGKALIKKYPKLESEFVYGDYPVYNSYKVMAESNSEIGKATEKMFFYSNIMNFFKSEVKLADGQIFERPQIEVNEETGEIAWDKVKHIRTVRKVLSMPQVNIVKKTEVQTGGFSKESILPKRDSDKLIARKKDWDTKKYGGFDSPTVAYSVLVVADIEKGKSKKLKTVKELVGITIMERSRFEKNPVAFLESKGYQNIQKDNIIKLPKYSLFELENGRKRLLASAGELQKGNELALPQHYVTLLYHAKHYEKLKEKSEDIPKHLEYVKNHKQEFKELLNQISEFSERYILADKNLEKIRELYAKNQDASVEELASSFINLLTFTALGAPAAFKFFGKNIDRKRYTSTTECLNATLIHQSITGLYETRIDLSKLGED

SEQ ID NO: 151 - protein, 1368 aa, synthetic construct
MKKKYSIGLDIGTNSVGWAVITDEYKVPSKKFKVLGNTDRQSIKKNLIGALLFDSGETAEATRLKRTARRRYTRRKNRIRYLQEIFAEEMAKVDDSFFHRLEESFLVEEDKKHERHPIFGNIVDEVAYHEKYPTIYHLRKKLVDSTEKADLRLIYLALAHMIKFRGHFLIEGDLNSENSDVDKLFIQLVQTYNQLFEENPINESGVDAKAILSAKLSKSRRLENLIAQFPGEKKNGLFGNLIALSLGLTPNFKSNFDLAEDAKLQLSKDTYDDDLENLLAQIGDQYADLFLAAKNLSDAILLSDILRVNTEITKAPLSASMIKRYDEHHQDLTLLKALVRQQLPEKYKEIFFDKSKNGYAGYIDGGASQEEFYKFIKPILEKMDGTEELLAKLNREDLLRKQRTFDNGSIPHQIHLGELHAILRRQEEFYPFLKENREKIEKILTFRIPYYVGPLARGNSRFAWMTRKSEETITPWNFEEVVDKGASAQSFIERMTNFDKNLPTEKVLPKHSLLYEYFTVYNELTKVKYVTEGMRKPEFLSGEQKKEIVDLLFKKNRKVTVKQLKEDYFKKIECFDSVEISGVEDRFNASLGTYHDLLKIIKDKEFLDNEENEDILEDIVLTLTLFEDREMIEERLKKYANLFDKKVMKQLKRRRYTGWGRLSRKLINGIRDKQSGKTILDFLKSDGFANRNFMQLIHDDSLTFKEEIKKAQVIGQGDSLHEQIANLAGSPAIKKGILQTVKVVDELVKVMGRHKPENIVIEMARENQTTQKGQKNSRERMKRIEEGIKELGSQILKEHPVENTQLQNEKLYLYYLQNGRDMYTGDELDINRLSDYDVDHIVPQSFLKDDSIDNKVLTRSKEARGKSDNVPSEEVVKKMKSYWRQLLNAKLITQRKFDNLTKAERGGLSELDKAGFIKRQLVETRQITKHVAQILDSRMNTKRDENDKLIRDVKVITLKSKLVSDFRKDFQFYKVREINNYHHAHDAYLNAVVGTALIKKYPKLESEFVYGDYKVYDVRKMIAKSEQEIGKATAKYFFYSNIMNFFKTEIKLANGEIRKRPLIETNEETGEIVWDKERDFATVRKVLSMPQVNIVKKTEVQTGGFSKESILPKRESDKLIARKKDWDPKKYGGFDSPTVAYSVLVVAKVEKGKTKKLKTVKELLGITIMERSSFEKDPVAFLEAKGYKEVKKDLIIKLPKYSLFELENGRKRMLASAGELQKGNELALPSKYVNFLYLASHYEKLKGKPEDNEKKQLYVEQHKHYLDEIIDQISEFSERVILADKNLDKVLSAYNNFRDKSIREQAENIIHLFTLTNLGAPAAFKYFGTTIDRKRYTSTKEVLDATLIHQSITGLYETRIDLSQLGGD

SEQ ID NO: 152 - protein, 1368 aa, synthetic construct
MDKKYSIGLDIGTNSVGWAVVTDEYKVPSKKFKVLGNTDRHSIKKNLIGALLFDSGETAEATRLKRTARRRYTRRKNRILYLQEIFAEEMAKVDDSFFHRLEESFLVEEDKRNERHPIFGNIVDEVAYHEKYPTIYHLRKELADSPEKADLRLVYLALAHIIKFRGHFLIEGDLNAENSDVQKLFDQLVQTYNQLFEESPLEEEGVDAKAILTEKLSKSRRLENLIAEFPGEKKNGLFGNLIALSLGLTPNFKSNFDLSEDAKLQLSKDTYDEDLEELLGQIGDEYADLFLAAKNLYDAILLSGILTVSDEITKAPLSASMVKRYDEHHQDLTLLKDLIRKQLPEKYKEIFFDQSKNGYAGYIDGGASQEEFYKYLKKILEKIDGSEEFLDKIEREDFLRKQRTFDNGSIPHQIHLQELHAILRRQEKYYPFLKENREKIEKILTFRIPYYVGPLARGNSRFAWMSRKSDETITPWNFEEVVDKEASAQAFIERMTNFDKNLPNEKVLPKHSLLYEKFTVYNELTKVKYVTEGMRKPEFLSAEQKQEIVDLLFKKNRKVTVKQLKEYLFKEFECFDIVEISGVEDRFNASLGTYHDLLKIIKDKDFLDNPENEEILEDIVLTLTLFEDREMIKQRLKKYADLFDKKQLKKLSRRRYTGWGRLSKKLINGIRDKQSGKTILDYLKDDGFANRNFMQLIHDDSLTFKEEIKKAQVIGQGESLHELIANLAGSPAIKKGILQSLKIVDEIVKVMGRYEPENIVIEMARENQTTQKGQKNSRERMKRIEEGIKELGSQILKEHPVENTQLQNEKLYLYYLQNGRDMYVDQELDINRLSDYDVDHIVPQSFLKDDSIDNKVLTRSDKARGKSDNVPSEEVVKKMKNYWRQLLNAKLITQRKFDNLTKAERGGLSELDKAGFIKRQLVETRQITKHVAQILDSRFNTKYDENDKLIRDVKIITLKSKLVSDFRKDFQLYKVREINNYHHAHDAYLNAVVGTALIKKYPKLESEFVYGDYKVYDVRKMIAKSEREIGKATAKYFFYSNIMNFFKSEITLANGEIRKRPLIEVNEETGEIVWDKEKDFATVRKVLSMPQVNIVKKTEVQTGGFSKESILPKRNSDKLIARKKDWDTKKYGGFDSPTVAYSVLVVAKVEKGKAKKLKTVKELVGITIMERSAFEKNPIAFLEAKGYKEIKKDLIIKLPKYSLFELENGRKRMLASAGELQKGNELALPQKYVTLLYHASHYEKLKGSPEDNEEKQLFVEQHKHYFDEILEQISEFSKRYILADANLEKIKKLYEKNRDLSIEELAENFIHLLTFTALGAPAAFKFFDTTIDRKRYTSTKEILNATLIHQSITGLYETRIDLSQLGGD

SEQ ID NO: 153 - protein, 1368 aa, synthetic construct
MDKKYSIGLDIGTNSVGWAVITDEYKVPSKKFKVLGNTDRHSIKKNLIGALLFDSGETAEATRLKRTARRRYTRRKNRICYLQEIFSNEMAKVDDSFFHRLEESFLVEEDKKHERHPIFGNIVEEVAYHEKYPTIYHLRKKLADSDEKADLRLIYLALAHMIKFRGHFLIEGDLNSENSDVDKLFIQLVQTYNQLFEENPINASGVDAKAILSARLSKSRRLENLIAQLPGEKKNGLFGNLIALSLGLTPNFKSNFDLAEDAKLQLSKDTYDDDLDNLLAQIGDQYADLFLAAKNLSDAILLSDILRVNTEITKAPLSASMIKRYDEHHQDLTLLKALVRQQLPEKYKEIFFDQSKNGYAGYIDGGASQEEFYKFIKPILEKMDGTEELLVKLNREDLLRKQRTFDNGSIPHQIHLGELHAILRRQEDFYPFLKDNREKIEKILTFRIPYYVGPLARGNSRFAWMTRKSEETITPWNFEEVVDKGASAQSFIERMTNFDKNLPNEKVLPKHSLLYEYFTVYNELTKVKYVTEGMRKPAFLSGEQKKAIVDLLFKTNRKVTVKQLKEDYFKKIECFDSVEISGVEDRFNASLGTYHDLLKIIKDKDFLDNEENEDILEDIVLTLTLFEDREMIEERLKTYAHLFDDKVMKQLKRRRYTGWGRLSRKLINGIRDKQSGKTILDFLKSDGFANRNFMQLIHDDSLTFKEDIQKAQVSGQGESLHEQIANLAGSPAIKKGILQTIKIVDELVKVMGRHKPENIVIEMARENQTTQKGQKNSRERMKRIEEGIKELGSQILKEHPVENTQLQNEKLYLYYLQNGRDMYVDQELDINRLSDYDVDHIVPQSFLKDDSIDNKVLTRSDKARGKSDNVPSEEVVKKMKNYWRQLLNAKLITQRKFDNLTKAERGGLSELDKAGFIKRQLVETRQITKHVAQILDSRFNTEYDENDKLIRDVKIITLKSKLVSDFRKDFQLYKVREINNYHHAHDAYLNAVVGTALIKKYPKLESEFVYGDYKVYDVRKMIAKSEQEIGKATAKYFFYSNIMNFFKTDVTLANGEIRKRPLIEVNEETGEIVWDKEKDFATVKKVLSMPQVNIVKKTEVQTGGFSKESILPKRDSDKLIARKKDWDTKKYGGFDSPTVAYSVLVIAKVEKGKAKKLKTVKELVGITIMERSSFEKDPVAFLEAKGYKDIQKELIIKLPKYSLFELENGRKRLLASAGELQKGNELALPNKYVTLLYHAKHYEKLKGSPEDNKYKQIYVEQHQEYFDEIIDQIIEFSKRYILADANLEKLKSLYEKNRDASIEELAENFIHLLTFTNLGAPAAFKFFDTTIDRKRYTSTKEILNATLIHQSITGLYETRIDLSQLGGD

SEQ ID NO: 154 - protein, 1368 aa, synthetic construct
MKKPYSIGLDIGTNSVGWAVVTDDYKVPSKKMKVLGNTDRQSIKKNLIGALLFDSGETAEATRLKRTARRRYTRRKNRIRYLQEIFAEEMNKVDDSFFHRLEESFLVEEDKKGERHPIFGNIVDEVKYHEKFPTIYHLRKHLADSTEKADLRLVYLALAHIIKFRGHFLIEGDLNARNTDVQKLFEQFVQVYDDTFEESHLSEETVDAKAILTEKVSKSRRLENLIAQFPGEKKNGLFGNLIALSLGLQPNFKSNFELSEDAKLQFSKDTYDEDLENLLGQIGDGYADLFVAAKNLYDAILLSGILTVNDESTKAPLSASMIKRYDEHHKDLTKLKEFIRKQLPEKYKEIFFDQTKNGYAGYIDGGTSQEEFYKYIKKLLSKMDGSEYFLDKIEREDFLRKQRTFDNGSIPHQIHLGELHAILRRQGEYYPFLKENQEKIEKILTFRIPYYVGPLARGNSRFAWASRKSDETITPWNFEEVVDKEASAQAFIERMTNNDLYLPDEKVLPKHSLLYEKFTVYNELTKVKYVTEGMGKAEFFSANLKQEIFDGLFKKYRKVTKKKLLEFLFKEFDEFRIVDISGVEKAFNASLGTYHDLLKIIKDKEFLDDEENEEILEDIVLTLTLFEDREMIRQRLSKYADLFDKKVLKKLERRHYTGWGRLSAKLINGIRDKQSGKTILDYLIDDGFANRNFMQLIHDDRLTFKEEIKKAQVIGDGDSLHEIVAELAGSPAIKKGILQSLKIVDELVKVMGRYNPENIVIEMARENQTTAKGQRNSRERLKRLEEAIKDLGSNILKEHPVENTQLQNDRLYLYYLQNGKDMYTGEELDIDRLSQYDVDHIIPQSFIKDDSIDNRVLTSSAKARGKSDNVPSIEVVKKMKSYWNRLLNAKLISQRKFDNLTKAERGGLSEDDKAGFIKRQLVETRQITKHVAQILDSRFNTEFDENNKLIRDVKIITLKSKLVSQFRKDFELYKVREINDYHHAHDAYLNAVVGKALIKKYPKLEPEFVYGDYPKYNSYKMVGKSKQERGKATAKVFFYSNIMNFFKSDVKLADGRIVERPVIETNEETGEIVWDKVKDIATVRKVLSMPQVNIVKKTEVQTGGFSKESILPKRNSDKLIARKKKWDPKKYGGFDSPTVAYSVLVVADIEKGKAKKLKTVKELVGITIMERSAFEKDPVAFLEDKGYQNIQKDLIIKLPKYSLFELENGRKRLLASAGELQKGNELALPNKLVTLLYHAKHIEKLTGKPEDQEKKLQYVEEHKHDFDEILSQISEFSKRYILADKNLEKIEELYHKNRDASIEELASSFINLFTFTALGAPAAFKFLGTTIDRKRYTSTTECLNATLIHQSITGLYETRIDLSKLGGD

SEQ ID NO: 155 - protein, 1368 aa, synthetic construct
MKKPYSIGLDIGTNSVGWAVITDEYKVPSKKFKVLGNTDRQSIKKNLIGALLFDSGETAEATRLKRTARRRYTRRKNRICYLQEIFSEEMSKVDDSFFHRLEESFLVEEDKRHERHPIFGNIVDEVAYHENYPTIYHLRKKLADSTEKADLRLIYLALAHMIKFRGHFLIEGDLNSENTDVQKLFIQLVQTYNQLFEENPIEEEGVDAKAILSAKLSKSRRLENLIALLPGEKKNGLFGNLIALSLGLTPNFKSNFELAEDAKLQLSKDTYDEDLENLLAQIGDQYADLFLAAKNLSDAILLSDILTVNDVITKAPLSASMIKRYDEHHQDLTLLKALVRQQLPEKYKEIFFDDSKNGYAGYIDGGASQEEFYKYIKPILEKMDGTEYLLAKIEREDFLRKQRTFDNGSIPHQIHLGELHAILRRQEDFYPFLKENREKIEKILTFRIPYYVGPLARGNSRFAWLKRKSEETITPWNFEEVVDKEASAQAFIERMTNFDKNLPNEKVLPKHSLLYEYFTVYNELTKVKYVTEGMGKPEFLSGEQKEEIVDLLFKKNRKVTVKQLKEDYFKKIECFDSVEISGVEDRFNASLGTYHDLLKIIKDKDFLDNEENEDILEDIVLTLTLFEDREMIEERLKKYAHLFDKKVLKKLKRRRYTGWGRLSRKLINGIRDKQSGKTILDFLKSDGFANRNFMQLIHDDSLTFKEEIKKAQVKGQGESLHEVIADLAGSPAIKKGILQSVKIVDELVKVMGRHNPENIVIEMARENQTTQKGQKNSRERMKRIEEGIKELGSQILKEHPVENTQLQNEKLYLYYLQNGRDMYVDQELDINRLSDYDVDHIVPQSFLKDDSIDNKVLTRSDKARGKSDNVPSEEVVKKMKNYWRQLLNAKLITQRKFDNLTKAERGGLSELDKAGFIKRQLVETRQITKHVAQILDSRFNTERDENDKLIREVKIITLKSKLVSDFRKDFGFYKVREINNYHHAHDAYLNAVVGTALIKKYPKLESEFVYGDYKVYDVRKMIAKSEQEIGKATAKYFFYSNIMNFFKTEITLANGEIRKRPLIETNEETGEIVWDKERDFATVRKVLSMPQVNIVKKTEVQTGGFSKESILPKRNSDKLIARKKDWDTKKYGGFDSPTVAYSVLVVAKVEKGKSKKLKTVKELVGITIMERSSFEKNPIAFLEKKGYKNVQKELIIKLPKYSLFELENGRKRLLASAGELQKGNELALPSHYVTLLYLAKNYEKLKGKIEDLSKHLEYVEQHKEYFDEIFDQIIEFSERYILADKNLSKILELYDENREKDIKELAENFIHLLTFTSLGAPAAFKFFDTTIDRKRYTSTTEILNATLIHQSITGLYETRIDLSQLGGD

SEQ ID NO: 156 - protein, 1368 aa, synthetic construct
MDKKYSIGLDIGTNSVGWAVITDEYKVPSKKFKVLGNTDRHSIKKNLIGALLFDSGETAEATRLKRTARRRYTRRKNRICYLQEIFSNEMAKVDPSFFHRLEESFLVEEDKRGERHPIFGNIVEEVAYHEKYPTIYHLRKHLADSDEKADLRLVYLALAHIIKFRGHFLIEGDLNAENSDVQKLFKELVQIYDQTFEESHLSEETVDAEAILTEKLSKSRRLENLIAQFPGEKKNGLFGNLIKLSLGLTPNFKSNFDLEEDAKLQFSKDTYDEDLEELLGQIGDEYADLFVAAKNLYDAILLSGILTVSDSSTKAPLSASMVKRYDEHHQDLTLLKEFIREQLPEKYKEIFFDQSKNGYAGYIDGGASQEEFYKYLKKILEKIDGSEEFLDKIEREDFLRKQRTFDNGSIPHQIHLQELHAIIRRQEKYYPFLKENKEKIEKILTFRIPYYVGPLARGNSRFAWLSRKSDETITPWNFDEVVDKEASAEAFIERMTNFDKNLPDEKVLPKHSLLYEKFTVYNELTKVKYVTEGGKKPEFFDANQKQEIVDNLFKKYRKVTKKQLLEYLEKEFDEFRIVEISGVEDRFNASLGTYHDLLKIIFDKDFLDNEENEEILEDIVLTLTLFEDREMIKKRLEKYADLFDKKQIKKLSRRRYTGWGRLSAKLINGIRDKQTGKTILDYLIDDGFANRNFMQLIHDDSLSFKEEIEKAQVIGDGDSLHEHIANLAGSPAIKKGILQTVKVVDELVKVMGRHKPENIVIEMARENQTTQKGQKNSRERMKRIEEGIKELGSQILKEHPVENTQLQNEKLYLYYLQNGRDMYVDQELDINRLSDYDVDHIVPQSFLKDDSIDNKVLTRSDKARGKSDNVPSEEVVKKMKNYWRQLLNAKLITQRKFDNLTKAERGGLSELDKAGFIKRQLVETRQITKHVAQILDSRMNTKYDENDKLIREVKVITLKSKLVSDFRKDFQFYKVREINNYHHAHDAYLNAVVGTALIKKYPKLESEFVYGDYKVYDVRKMIAKSEQEIGKATAKYFFYSNIMNFFKTEITLANGEIRKRPLIETNGETGEIVWDKGRDFATVRKVLSMPQVNIVKKTEVQTGGFSKESILPKRDSDKLIARKKDWDTKKYGGFDSPTVAYSVLVVADIEKGKAKKLKTVKELVGITIMERSAFEKNPIAFLESKGYQNIQKDNIIKLPKYSLFELENGRKRLLASAGELQKGNELALPNHYVTLLYHAKHYEKLKGSPEDNEEHQIYVEQHRDEFDEILDQISEFSKRYILADANIEKLKKLYEKNRDASIEELAENFIHLLTFTALGAPAAFKFFGKNIDRKRYTSTKEILNATLIHQSITGLYETRIDLSKLGGD

SEQ ID NO: 157 - protein, 1368 aa, synthetic construct
MDKKYSIGLDIGTNSVGWAVITDEYKVPSKKFKVLGNTDRHSIKKNLIGALLFDSGETAEATRLKRTARRRYTRRKNRICYLQEIFSNEMAKVDDSFFHRLEESFLVEEDKKHERHPIFGNIVDEVAYHEKYPTIYHLRKKLVDSTDKADLRLIYLALAHMIKFRGHFLIEGDLNPDNSDVDKLFIQLVQTYNQLFEENPINASGVDAKAILSARLSKSRRLENLIAQLPGEKKNGLFGNLIALSLGLTPNFKSNFDLAEDAKLQLSKDTYDDDLDNLLAQIGDQYADLFLAAKNLSDAILLSDILRVNTEITKAPLSASMIKRYDEHHQDLTLLKALVRQQLPEKYKEIFFDQSKNGYAGYIDGGASQEEFYKFIKPILEKMDGTEELLVKLNREDLLRKQRTFDNGSIPHQIHLGELHAILRRQEDFYPFLKDNREKIEKILTFRIPYYVGPLARGNSRFAWMTRKSEETITPWNFEEVVDKGASAQSFIERMTNFDKNLPNEKVLPKHSLLYEYFTVYNELTKVKYVTEGMRKPAFLSGEQKKAIVDLLFKTNRKVTVKQLKEDYFKKIECFDSVEISGVEDRFNASLGTYHDLLKIIKDKDFLDNEENEDILEDIVLTLTLFEDREMIEERLKTYAHLFDDKVMKQLKRRRYTGWGRLSRKLINGIRDKQSGKTILDFLKSDGFANRNFMQLIHDDSLTFKEDIQKAQVSGQGDSLHEHIANLAGSPAIKKGILQTVKVVDELVKVMGRHKPENIVIEMARENQTTQKGQKNSRERMKRIEEGIKELGSQILKEHPVENTQLQNEKLYLYYLQNGRDMYVDQELDINRLSDYDVDHIVPQSFLKDDSIDNKVLTRSDKARGKSDNVPSEEVVKKMKNYWRQLLNAKLITQRKFDNLTKAERGGLSELDKAGFIKRQLVETRQITKHVAQILDSRMNTKYDENDKLIREVKVITLKSKLVSDFRKDFQFYKVREINNYHHAHDAYLNAVVGTALIKKYPKLESEFVYGDYKVYDVRKMIAKSEQEIGKATAKYFFYSNIMNFFKTEITLANGEIRKRPLIETNGETGEIVWDKGRDFATVRKVLSMPQVNIVKKTEVQTGGFSKESILPKRNSDKLIARKKDWDTSKYGGFDSPTVAYSVLVIAKVEKGKSKKLKTVKELVGITIMERSAFEKDPVAFLENKGYQNVQKELIIKLPKYSLFELENGRKRLLASAGELQKGNELALPNHYVTLLYHAKNYEKIKGSEEDEKRKQIYVEDHRYEFDEILDQVSEFSERYILADANLEKITNLYEKNIEASIEELASSFLNLLKFTKLGAPAAFKFFGTTIDRKRYTSTKEILNATLIHQSITGLYETRIDLSKLGGD

SEQ ID NO: 158 - protein, 1368 aa, synthetic construct
MDKKYSIGLDIGTNSVGWAVITDEYKVPSKKFKVLGNTDRHSIKKNLIGALLFDSGETAEATRLKRTARRRYTRRKNRICYLQEIFSNEMAKVDPSFFERLEESFLVEEDKKTSRHPIFGNIVEEVAYHEKYPTIYHLRKKLVDSDEKADLRLIYLALAHMIKFRGHFLIEGDLNPDNSDVDKLFIQLVQTYNQLFEENPINASGVDAKAILSARLSKSRRLENLIAQLPGEKKNGLFGNLIALSLGLTPNFKSNFDLAEDAKLQLSKDTYDDDLDNLLAQIGDQYADLFLAAKNLSDAILLSDILRVNTEETKAPLSASMIKRYDDHHQDLTKLKELVRKELPEKYKTIFFNQNANGYAGYIDGGATQEEFYAAIKPILESMSGTKDLLEKLDNRDLLRKQRTFDNGSIPHQIHLGELRAILERQEKFYPFLKENREKIEKILTFRIPYYVGPLARGNSRFAWMTRKSEETITPWNFEEVVDKGASAQSFIERMTNFDKNLPNEKVLPKHSLLYEYFTVYNELTKVKYVTEGMRKPAFLSGEQKKAIVDLLFKTNRKVTVKQLKEDYFKKIECFDSVEISGVEDRFNASLGTYHDLLKIIKDKDFLDNEENEDILEDIVLTLTLFEDREMIEERLKTYAHLFDDKVMKQLKRRRYTGWGRLSRKLINGIRDKQSGKTILDFLKSDGFANRNFMQLIHDDSLTFKEDIQKAQVSGQGDSLHEHIANLAGSPAIKKGILQTVKVVDELVKVMGRHKPENIVIEMARENQTTQKGQKNSRERMKRIEEGIKELGSQILKEHPVENTQLQNEKLYLYYLQNGRDMYVDQELDINRLSDYDVDHIVPQSFLKDDSIDNKVLTRSDKARGKSDNVPSEEVVKKMKNYWRQLLNAKLITQRKFDNLTKAERGGLSELDKAGFIKRQLVETRQITKHVAQILDSRMNTKYDENDKLIREVKVITLKSKLVSDFRKDFQFYKVREINNYHHAHDAYLNAVVGTALIKKYPKLESEFVYGDYKVYDVRKMIAKSEQEIGKATAKYFFYSNIMNFFKTEITLANGEIRKRPLIETNGETGEIVWDKGRDFATVRKVLSMPQVNIVKKTEVQTGGFSKESILPKRDSDKLIARKKDWDPKKYGGFDSPTVAYSVLVVAKKEVGEKKKLKKVKELLGITIMERSKFEKDPLKFLEEKGYKDVKEDEIIKLPKYSLFELGNGRKRMLASAGELQKGNELALPSEYVNFLYLASDYEKLKGDPEEKEKKQKYVEENKQYLDDIINQISEFSKRVIKADANLEKVLKAYEKHKDKPIKEQAENIIHLFTLTRLGAPAAFKYFDEKIDRKRYTSTKEVLDATLIHQSITGLYETRIDLKFLGGD

SEQ ID NO: 159 - protein, 1368 aa, synthetic construct
MDKKYSIGLDIGTNSVGWAVVTDEYKVPSKKFKVLGNTDRHSIKKNLLGALLFDSGETAEATRLKRTARRRYTRRKNRIRYLQEIFAEEMAKVDDSFFHRLEESFLVEEDKRNERHPIFGNIVEEVAYHEKYPTIYHLRKKLADSTEKADLRLVYLALAHMIKFRGHFLIEGDLNSENSDVQKLFEQLVQTYNQLFEESPLEEEKVDAKAILTEKLSKSRRLENLIANFPGEKKNGLFGNLIALSLGLTPNFKSNFDLSEDAKLQLSKDTYDEDLENLLAQIGDQYADLFVAAKNLSDAILLSGILTVNDESTKAPLSASMVKRYDEHHQDLTLLKKFVRDQLPEKYKEIFFDQSKNGYAGYIDGGASQEEFYKYIKPILEKVDGSEEFLDKIEREDFLRKQRTFDNGSIPHQIHLQELHAILRRQEEYYPFLKENQEKIEKILTFRIPYYVGPLARGNSRFAWMSRKSDETITPWNFEEVVDKEASAQKFIERMTNFDKNLPNEKVLPKHSLLYEKFTVYNELTKVKYVTEGMRKPEFLSGEQKQEIVDLLFKKERKVTVKQLKEYLFKEFDCFDSVEISGVEDRFNASLGTYHDLLKIIKDKDFLDNEENEDILEDIILTLTLFEDREMIKKRLEKYADLFDKKVLKQLKRRRYTGWGRLSAKLINGIRDKQSGKTILDYLIDDGFANRNFMQLIHDDSLTFKEEIEKAQVIGKGDSLHEQIANLAGSPAIKKGILQTLKIVDELVKVMGRHAPENIVIEMARENQTTQKGQKNSRERMKRIEEGIKELGSQILKEHPVENTQLQNEKLYLYYLQNGRDMYVDQELDINRLSDYDVDHIVPQSFLKDDSIDNKVLTRSDKARGKSDNVPSEEVVKKMKNYWRQLLNAKLITQRKFDNLTKAERGGLSELDKAGFIKRQLVETRQITKHVAQILDSRFNTKYDENDKLIRDVKIITLKSKLVSDFRKDFELYKVREINNYHHAHDAYLNAVVGTALIKKYPKLESEFVYGDYKVYDVRKMIAKSEQEIGKATAKYFFYSNIMNFFKTDITLANGEIRKRPLIETNEETGEIVWDKEKDFATVRKVLSMPQVNIVKKTEVQTGGFSKESILPKRDSDKLIARKKDWDTKKYGGFDSPTVAYSVLVIAKVEKGKAKKLKTVKELVGITIMERSAFEKDPVAFLEAKGYQNIKKDLIIKLPKYSLFELENGRKRLLASAGELQKGNELALPQKYVTLLYHAKHYEKLKGKPEDNEEKQLYVEQHKYYFDEIFDQISEFSKRYILADANLEKLISLYEKNRDKSIEELAENFIHLLTFTALGAPAAFKFFDTTIDRKRYTSTKEILNATLIHQSITGLYETRIDLSKLGGD

SEQ ID NO: 160 - protein, 1368 aa, synthetic construct
MKKKYSIGLDIGTNSVGWAVITDEYKVPSKKFKVLGNTDRQSIKKNLIGALLFDSGETAEATRLKRTARRRYTRRKNRIRYLQEIFAEEMNKVDDSFFHRLEESFLVEEDKRHDRHPIFGNIVDEVAYHENYPTIYHLRKELVDSPEKADLRLIYLALAHMIKFRGHFLIEGDLNSENTDVQKLFKQLVQTYNQLFEEKPLNEETVDAEAILSEKLSKSRRLENLIAQFPGEKKNGLFGNLIALSLGLTPNFKSNFELSEDAKLQLSKDTYDEDLENLLGQIGDEYADLFLAAKNLYDAILLSGILRVKDESTKAPLSASMIKRYDEHHQDLTLLKALVRQQLPEKYKEIFFDASKNGYAGYIDGGASQEEFYKFIKPILSKMDGTEYLLDKLEREDLLRKQRTFDNGSIPHQIHLQELHAILRRQEEYYPFLKENQEKIEKILTFRIPYYVGPLARGNSRFAWMTRKSDETITPWNFEEVVDKGASAQAFIERMTNNDKNLPNEKVLPKHSLLYEKFTVYNELTKVKYVTEGMGKPEFLSGEQKKEIVDLLFKKERKVTVKKLKEFYFKEFEEFRIVEISGVEDRFNASLGTYHDLLKIIKDKDFLDNEENEDILEDIVLTLTLFEDREMIEKRLEKYANLFDKKVMKQLKRRRYTGWGRLSAKLINGIRDKQSGKTILDFLISDGFANRNFMQLIHDDSLTFKEEIKKAQEIGQGDSLHEQIADLAGSPAIKKGILQTVKVVDELVKVMGRHKPENIVIEMARENQTTQKGQKNSRERLKRIEEGIKKLGSDILKEYPVENTQLQNDKLYLYYLQNGRDMYTGEELDIDRLSDYDVDHIVPQSFIKDDSIDNKVLTRSKEARGKSDDVPSEDVVKKMKSYWRQLLKAKLITQRKFDNLTKAERGGLTELDKAGFIKRQLVETRQITKHVAQILDSRMNTEYDENNKLIRDVKVITLKSKLVSDFRKDFQFYKVREINDYHHAHDAYLNAVVGTALIKKYPKLESEFVYGDYKVYDVRKMIAKSEQEIGKATAKYFFYSNIMNFFKTEITLANGEIRKRPLIETNGETGEIVWDKGRDFATVRKVLSMPQVNIVKKTEVQTGGFSKESILPKRNSDKLIARKKDWDPKKYGGFDSPTVAYSVLVVAKVEKGKSKKLKSVKELLGITIMERSSFEKNPIDFLEAKGYKEVKKDLIIKLPKYSLFELENGRKRMLASAGELQKGNELALPSKYVNFLYLASHYEKLKGSPEDNEQKQLFVEQHKHYLDEIIEQISEFSKRVILADANLDKVLSAYNKHRDKPIREQAENIIHLFTLTNLGAPAAFKYFDTTIDRKRYTSTKEVLDATLIHQSITGLYETRIDLSQLGGD

SEQ ID NO: 161 - protein, 1368 aa, synthetic construct
MDKKYSIGLDIGTNSVGWAVITDEYKVPSKKFKVLGNTDRKSIKKNLIGALLFDSGETAEATRLKRTARRRYTRRKNRICYLQEIFSSEMAKVDDSFFHRLEESFLVEEDKRHERHPIFGNIVEEVAYHEKYPTIYHLRKKLVDSDDKADLRLIYLALAHMIKFRGHFLIEGDLNPDNSDVDKLFIQLLQTYNQLFEENPIEAEDIDAKAILTERLSKSRRLENLIAQLPNEKKNGLFGNLIALSLGLTPNFKSNFDLAEDAKLQLSKDTYDEDLENLLGQIGDQYADLFLAAKNLYDAILLSDILRVNTEITKAPLSASMIKRYDEHHQDLTLLKALVRQQLPEKYKEIFFDQSKNGYAGYIDGGASQEEFYKFIKPILEKMDGTEELLVKLEREDLLRKQRTFDNGSIPHQIHLGELHAILRRQEDFYPFLKDNREKIEKILTFRIPYYVGPLARGNSRFAWMTRKSDETITPWNFEEVVDKGASAQSFIERMTNFDKNLPNEKVLPKHSLLYEYFTVYNELTKVKYVTEGMRKPAFLDGEQKKEIVDLLFKTNRKVTVKQLKEDFFKKIDCFDSVEISGVEDRFNASLGTYHDLLKIIKDKDFLDNEENEDILEDIVLTLTLFEDREMIEKRLKTYANLFDKKVMKQLKRRRYTGWGRLSRKLINGIRDKQSGKTILDFLKSDGFANRNFMQLIHDDSLTFKEDIQKAQVSGQGDSLHEQIANLAGSPAIKKGILQTLKVVDELVKVMGRYKPENIVIEMARENQTTQKGQKNSRERMKRIEEGIKELGSDILKEHPVENTQLQNEKLYLYYLQNGRDMYTDQELDINRLSDYDVDHIVPQSFLKDDSIDNKVLTSSEKARGKSDDVPSEEVVKKMKPYWRQLLNAKLITQRKFDNLTKAERGGLSELDKAGFIKRQLVETRQITKHVAQILDSRMNTKYDENDKLIRDVKVITLKSKLVSDFRKDFQFYKVREINNYHHAHDAYLNAVVGTALIKKYPKLESEFVYGDYKVYDVKKMIAKSDREIGKATAKYFFYSNIMNFFKSDVKLADGTIRKRPLIEVNEETGEIVWDKGRDFATVRKVLSMPQVNIVKKTEVQTGGFSKESILPKRNSDKLIARKKDWDPSKYGGFDSPTVAYSVLVIAKIEKGKAKKLKSVKELLGITIMERSSFEKNPVDFLEAKGYQNIQKELIIKLPKYSLFELENGRKRLLASAGELQKGNELALPNKYVDFLYHASHYEKLKGSPEDEKYSQLFVEQHRHYFDELFEQIIEFSERYILADANLEKIKNLYEKHSELSIREQAENILNLFTFTNLGAPAAFKYFDTDIDRKRYTSTKEILNATLIHQSITGLYETRIDLSQLGGD

SEQ ID NO: 162 - protein, 1368 aa, synthetic construct
MKKSYSIGLDIGTNSVGWAVVTDDYKVPSKKMKVLGNTDRSSIKKNLLGALLFDSGETAEATRLKRTARRRYTRRKNRILYLQEIFAEEMNKVDDSFFHRLEDSFLVEEDKRNERHPIFGNIVEEVAYHEEFPTIYHLRKHLADSTEKADLRLVYLALAHMIKFRGHFLIEGDLNAENSDVQKLFNDFVQHYNQTFEESPLSEETVDAESILTDKVSKSRKLENLIKQFPGEKKNGLFGNLIALSLGLQPNFKTNFELSEDAKLQFSKDTYDEDLENLLGQIGDEYADLFVAAKNLYDAILLSGILTVNDDSTKAPLSASMIKRYEEHHEDLTLLKAFVRKNLPEKYKEIFFDKSKNGYAGYIDGGTSQEEFYKYLKKILEKVDGSEYFLDKIEREDFLRKQRTFDNGSIPHQIHLQELKAILRRQETYYPFLKENQEKIEKILTFRIPYYVGPLARGNSRFAWMTRKSDETITPWNFEEVVDKEASAEKFIERMTNNDLYLPNEKVLPKHSLLYEKFTVYNELTKVKYVTEGMGKAEFFDAEQKQEIVDLLFKKERKVTKKKLLDFLKKVFDEFRIVDISGVEDAFNASLGTYHDLLKIIKDKEFLDDEENEDILEDIVLTLTLFEDREMIKQRLSKYADLFDKKVLKKLERRHYTGWGRLSAKLINGIRDKQSGKTILDYLIDDGFSNRNFMQLIHDDSLTFKEIIKKAQVSGNSDSLHEVVAELAGSPAIKKGILQSLKIVDELVKVMGRYNPENIVVEMARENQTTNKGQRNSRERLKRLEEAIKELGSKILKEHPVENTQLQNDRLYLYYLQNGKDMYTGEELDIDRLSDYDVDHIIPQSFIKDDSIDNRVLTSSAKARGKSDDVPSEEVVKKMKSFWKKLLRSKLISQRKFDNLTKAERGGLTEDDKAGFIKRQLVETRQITKHVAQILDSRFNTEFDENNKLIRDVKIITLKSKLVSRFRKEFEFYKVREINDYHHAHDAYLNAVVGTALIKKYPKLEPEFVYGDYPKYNSYKMIAKSEKERGKATAKMFFYSNIMNFFKTDIKLADGRIRERPVIEVNEETGEIVWDKNKHIATVRKVLSMPQVNIVKKTEVQTGGFSKESILPKRKSDKLIARKKKWDTKKYGGFDSPTVAYSVLVVADIEKGKKKKLKTVKELVGITIMERSSFEKDPVAFLEDKGYQNIRKDNIIKLPKYSLFELENGRKRLLASAGELQKGNELALPQKLVTLLYHAKHIEKLTEKKEDNEQHREYVEEHKHEFKEILDQISEFSKRYILADKNLEKILELYSKNREAPIKELAESFINLFTFTALGAPADFKFFGTTIDRKRYTSTKEILNATLIHQSITGLYETRIDLSKLGGD

SEQ ID NO: 163 - protein, 1368 aa, synthetic construct
MDKPYSIGLDIGTNSVGWAVITDEYKVPSKKFKVLGNTDRHSIKKNLLGALLFDSGETAEATRLKRTARRRYTRRKNRIRYLQEIFAEEMNKVDDSFFHRLEESFLVEEDKRSERHPIFGNIVDEVAYHEKYPTIYHLRKHLADSTEKADLRLVYLALAHIIKFRGHFLIEGDLNAENTDVQKLFIQFVQVYDNTFEESHLLESTVDAEAILTAKISKSRRLENLINQFPNEKKNGLFGNLIALSLGLTPNFKTNFELSEDAKLQFSKDTYEEDLENLLAQIGDQYADLFLAAKNLYDAILLSGILTVNTEITKAPLSASMIKRYDEHHQDLTLLKAFIRNELPEKYKEIFFDESKNGYAGYIDGGAKQEEFYKYIKGILSKIEGAEYFLDKIEREDFLRKQRTFDNGSIPHQIHLQELHAIIRRQEEFYPFLKENQEKIEKILTFRIPYYVGPLARGNSRFAWASRKSDETITPWNFEEVVDKEKSAEAFIERMTNYDKNLPNEKVLPKHSLLYEKFTVYNELTKVKYVTEGMRKPAFLDSNQKQEIVDGLFKENRKVTVKKLLNYLFKEFEEFRIVEISGVEKAFNASLGTYHDLLKIIKDKEFLDNEENEKILEDIVLTLTLFEDREMIKKRLKKYAHLFDKKVLKKLERRRYTGWGRLSAKLINGIRDKQTGKTILDYLIDDGFANRNFMQLIHDDSLSFKEEIAKAQVIGETDSLHEVIADLAGSPAIKKGILQSVKIVDELVKVMGRHNPENIVIEMARENQTTQKGQRNSRERLKRLEESIKKLGSKILKEHPVENTQLQNDKLYLYYLQNGKDMYTGEELDIDHLSDYDVDHIIPQSFIKDDSIDNRVLTSSKEARGKSDDVPSIEVVRKMKSFWSKLLKAKLISQRKFDNLTKAERGGLTELDKAGFIKRQLVETRQITKHVAQILDSRFNTKYDENDKLIRDVKIITLKSKLVSDFRKEFQLYKVREINDYHHAHDAYLNAVVGTALIKKYPKLESEFVYGDYKVYNSHKMIAKSEQEIGKATAKYFFYSNIMNFFKTDVTLANGEIRKRPLIETNEETGEIVWNKEKHFATVRKVLSMPQVNIVKKTEVQTGGFSKESILPKRNSDKLIARKKDWDPKKYGGFDSPTVAYSVLVVADIEKGKAKKLKTVKELVGITIMERSSFEKDPVAFLENKGYKNIQKDLIIKLPKYSLFELENGRKRLLASAGELQKGNELALPQKYVTLLYHAKHYEKLKGSPEDNPKHLEYVKQHRDEFDEILDQIEEFAERYILADKNLEKIKELYEENRDADIKELAESFINLLTFTALGAPAAFKFFDKKIDRKRYTSTTEILNATLIHQSITGLYETRIDLSQLGGD

SEQ ID NO: 164 - protein, 1368 aa, synthetic construct
MKKPYSIGLDIGTNSVGWAVITDDYKVPSKKMKVLGNTDRQSIKKNLLGALLFDSGETAEATRLKRTARRRYTRRKNRILYLQEIFAEEMAKVDDSFFHRLEDSFLVEEDKRGERHPIFGNIVEEVAYHEKFPTIYHLRKHLADSPEKADLRLVYLALAHIIKFRGHFLIEGDLDSENTDVQKLFKQFVEAYNNTFEESHLNEETVDAEAILTEKISKSRRLENLIALFPTEKKNGLFGNLIKLSLGLQPNFKTNFGLSEDAKLQFSKDTYEEDLENLLGQIGDEYADVFLAAKNLYDAILLSGILTVTDESTKAPLSASMIKRYDEHHQDLTLLKAFVREQLPEKYKEIFFDESKNGYAGYIDGGTSQEEFYKYLKKILEKLDGSEYFLDKIEREDFLRKQRTFDNGSIPHQIHLGELHAILRRQEEYYPFLKENQEKIEKILTFRIPYYVGPLARGNSRFAWASRKSDETITPWNFEEVVDKEKSAQAFIERMTNNDLYLPEEKVLPKHSLLYEKFTVYNELTKVKYVTEGMGEPEFFDANMKQEIVDELFKKNRKVTKKKLLEFLFKEFDEFRIVDISGVEKAFNASLGTYHDLLKIIKDKDFLDDEENEDILEDIVLTLTLFEDREMIEQRLQKYADLFDKKQLKKLKRRHYTGWGRLSAKLINGIRDKQSGKTILDYLKDDGQANRNFMQLIHDDSLSFKEEIAKAQVIGQSDSLHEVVADLAGSPAIKKGILQSLKIVDELVKVMGRHNPENIVIEMARENQTTAKGQRNSRERLKGLEEAIKNLGSKILKEHPVENSQLQNDRLYLYYLQNGKDMYTGEELDIDRLSQYDVDHIIPQSFIKDDSIDNRVLVSSKKARGKSDDVPSEEVVRKMKPYWRKLLNAKLISQRKFDNLTKAERGGLTEDDKAGFIKRQLVETRQITKHVAQILDSRFNKETDENDKLIRKVKIITLKSKLVSDFRKEFGFYKVREINDYHHAHDAYLNAVVGKALIKKYPKLEPEFVYGDYPKYNSYKMIAKSDQEEGKATAKMFFYSNLMNFFKTEIKLADGFIIERPQIEVNEETGEIVWDKTKHIATVRKVLSMPQVNIVKKTEVQTGGFSKESILPKRNSDKLIARKKKWDTKKYGGFDSPTVAYSVLVVADIEKGKAKKLKTVKELVGITIMERSTFEKNPIDFLEDKGYKNIQTDKIIKLPKYSLFELENGRKRLLASAGELQKGNELALPNKLVTLLYHAKHIEKLKEKYEDNEEHKEYVEQHRSQFDEILEQIVEFSKRYILADKNLEKITSLYKENEDYSVSELAESFINLLTFTALGAPAAFKFFGTDIDRKRYTSTKEILDATLIHQSITGLYETRIDLSKLGGD

SEQ ID NO: 165 - protein, 1368 aa, synthetic construct
MDKKYSIGLDIGTNSVGWAVITDEYKVPSKKFKVLGNTDRHSIKKNLIGALLFDSGETAEATRLKRTARRRYTRRKNRICYLQEIFSNEMAKVDESFFHRLEESFLVEEDKRGERHPIFGNIVEEVAYHEKYPTIYHLRKHLADSPEKADLRLIYLALAHIIKFRGHFLIEGDLNTENSDVQKLFHAFVEVYDRLFEESHLNEETVDAKAILTEKVSKSRRLENLIKQFPTEKKNGIFGNLIALSLGLQPNFKSNFGLSEDAKLQFSKDTYEEDLENLLGQIGDEYADLFSAAKNLYDAILLSGILTVNDNITKAPLSASMIKRYDEHHQDLTLLKAFVRQQLPEKYKEIFFDETKNGYAGYIDGGASQEEFYKYIKPILKKIDGSEYFLDKIDREDFLRKQRTFDNGSIPHQIHLQELHAILRRQAEYYPFLKENAEKIEKILTFRIPYYVGPLARGNSRFAWMTRKSNETITPWNFEEVVDKEASAEAFIERMTNFDKNLPEEKVLPKHSLLYETFTVYNELTKVKYVTEGMGKPEFFDANQKQEIVDLLFKKYRKVTKKKLLDFLFKEFEEFRIVDISGVEDAFNASLGTYHDLLKIIKDKEFLDNEENEDILEDIILTLTLFEDREMIEERLSKYADLFDKKVLKKLERRRYTGWGRLSAKLINGIRDKQSGKTILDYLIDDGYANRNFMQLIHDDSLSFKEEIKKAQVGGQGDSLHEHIANLAGSPAIKKGILQTVKVVDELVKVMGRHKPENIVIEMARENQTTQKGQRNSRERLKRLEEAIKELGSQILKEHPVENTQLQNDKLYLYYLQNGRDMYTGEELDIDRLSDYDVDHIIPQSFIKDDSIDNKVLTSSAKARGKSDNVPSEEVVKKMKSFWKKLLNSKLISQRKFDNLTKAERGGLSELDKAGFIKRQLVETRQITKHVAQILDSRMNTKYDENDKLIREVKVITLKSKLVSDFRKDFQFYKVREINNYHHAHDAYLNAVVGTALIKKYPKLESEFVYGDYKVYDVRKMIAKSEQEIGKATAKYFFYSNIMNFFKTEITLANGEIRKRPLIETNGETGEIVWDKGRDFATVRKVLSMPQVNIVKKTEVQTGGFSKESILPKRNSDKLIARKKDWDPKKYGGFDSPTVAYSVLVVAKVEKGKKKKLKTVKELVGITIMERSAFEKNPVAFLEDKGYKNIQEDKIIKLPKYSLFELENGRKRLLASAGELQKGNELALPNKYVTLLYHASHYEKLKGKPEDLPKHLEYVEQHRNEFKEILDQISEFAERYVLADKNIEKIKALYEENESFSIEEIATSFINLLKFTALGAPAAFKFFGTTIDRKRYTSTKEILNATLIHQSITGLYETRIDLSKLGGD

SEQ ID NO: 166 - protein, 1368 aa, synthetic construct
MDKPYSIGLDIGTNSVGWAVVTDEYKVPSKKFKVLGNTDRKSIKKNLLGALLFDSGETAEATRLKRTARRRYTRRKNRILYLQEIFAEEMNKVDESFFHRLEESFLVEEDKRGERHPIFGNIVEEVAYHEKYPTIYHLRKHLADSDEKADLRLVYLALAHIIKFRGHFLIEGDLDAENTDVQELFKELLEVYDRTFEESHLEEENVDAESILTEKISKSRRLEKLLALFPNEKKNGLFGEFLKLIVGLTPNFKSNFGLEEDAKLQFSKDTYDEDLEELLGQIGDEYAELFVAAKKLYDAILLSGILTVKDNSTKAPLSASMVKRYDEHHQDLTLLKKFIRKQLPEKYKEIFFDQSKNGYAGYIDGGASQEDFYKYLKKLLEKIDGSEYFLDKIEREDFLRKQRTFDNGSIPHQIHLQELHAIIRRQGEYYPFLKENQEKIEKILTFRIPYYVGPLARGNSRFAWLSRKSDETITPWNFDEIVDKEASAEAFIERMTNFDKNLPDEKVLPKHSLLYEKFTVYNELTKVKYVTEGGKKPEFFDANMKQEIFDGVFKKYRKVTKKQLLDYLKKEFDEFRIVDISGVEDRFNASLGTYHDLKKILDDKDFLDDEANEKILEDIILTLTLFEDREMIKKRLEKYSDLLDKEQLKKLERRRYTGWGRLSAKLINGIRDKETGKTILDYLIDDGNSNRNFMQLIHDDNLSFKEEIAKAQVIGDTESLHEVIANLAGSPAIKKGILQSLKIVDELVKVMGRHEPENIVVEMARENQTTQKGQKNSRERMKRLEESIKELGSDILKEHPVDNTKLQNDKLYLYYLQNGRDMYTGEELDIDKLSDYDVDHIVPQSFLKDDSIDNRVLVSSAKARGKSDDVPSEEVVNKMKGFWKKLLDAKLITQRKYDNLTKAERGGLTELDKAGFIKRQLVETRQITKHVAQILDERFNTEYDENGKLIRDVKIVTLKSKLVSQFRKEFELYKVREINNYHHAHDAYLNAVVGKALIKKYPKLESEFVYGDYPVYDVKKLIKKSDKEIGKATAKMFFYSNIMNFFKTDVKLADGTVVERPDIEVNDETGEIAWDKEKHIATVKKVLSMPQVNIVKKTEVQTGGFSKESILPKRDSDKLIARKKDWDTKKYGGFDSPTVAYSVLVIADIEKGKAKKLKTVKELVGITIMERSAFEKNPVAFLEDKGYQNIKKENIIKLPKYSLFELENGRKRLLASAGELQKGNELALPQHYVTLLYHAKHYEKLKGKPEDIEYHLIYVEEHRDEFDELLDQISEFSKRYILADANLEKIKKLYEKNKEASIEELAKSFINLLTFTALGAPAAFKFFGKNIDRKRYTSTKEILNATLIHQSITGLYETRIDLSKLGED

SEQ ID NO: 167 - protein, 1368 aa, synthetic construct
MDKKYSIGLDIGTNSVGWAVITDEYKVPSKKFKVLGNTDRHSIKKNLIGALLFDSGETAEATRLKRTARRRYTRRKNRICYLQEIFSNEMAKVDPSFFKRLEESFLVEEDKSGSRHPIFGNIVEEVAYHEKYPTIYHLRKKLVDSDEKADLRLIYLALAHMIKFRGHFLIEGDLNPDNSDVDKLFIQLVQTYNQLFEENPINASGVDAKAILSARLSKSRRLENLIAQLPGEKKNGLFGNLIALSLGLTPNFKSNFDLAEDAKLQLSKDTYDDDLDNLLAQIGDQYADLFLAAKNLSDAILLSDILRVDTTETKAPLSASMIKRYDDHHQDLTLLKELVRKELPEKYKTIFFDQNANGYAGYIDGGATQEEFYAAIKPILESMSGTKELLEKLENRDLLRKQRTFDNGSIPHQIHLGELRAILERQEKFYPFLKENREKIEKILSFRIPYYVGPLARGNSRFAWMTRKSEETITPWNFEEVVDKGASAQSFIERMTNFDKNLPNEKVLPKHSLLYEYFTVYNELTKVKYVTEGMRKPAFLSGEQKKAIVDLLFKTNRKVTVKQLKEDYFKKIECFDSVEISGVEDRFNASLGTYHDLLKIIKDKDFLDNEENEDILEDIVLTLTLFEDREMIEERLKTYAHLFDDKVMKQLKRRRYTGWGRLSRKLINGIRDKQSGKTILDFLKSDGFANRNFMQLIHDDSLTFKEDIQKAQVSGQGDSLHEHIANLAGSPAIKKGILQTVKVVDELVKVMGRHKPENIVIEMARENQTTQKGQKNSRERMKRIEEGIKELGSQILKEHPVENTQLQNEKLYLYYLQNGRDMYVDQELDINRLSDYDVDHIVPQSFLKDDSIDNKVLTRSDKARGKSDNVPSEEVVKKMKNYWRQLLNAKLITQRKFDNLTKAERGGLSELDKAGFIKRQLVETRQITKHVAQILDSRMNTKYDENDKLIREVKVITLKSKLVSDFRKDFQFYKVREINNYHHAHDAYLNAVVGTALIKKYPKLESEFVYGDYKVYDVRKMIAKSEQEIGKATAKYFFYSNIMNFFKTEITLANGEIRKRPLIETNGETGEIVWDKGRDFATVRKVLSMPQVNIVKKTEVQTGGFSKESILPKRDSDKLIARKKDWDPKKYGGFDSPTVAYSVLVVAKKPVGKKKKLVKVKELLGITIMERSEFEKDPLGFLEKKGYTDVKMDEIIKLPKYSLFELGNGRKRMLASAGELQKGNELALPSEYVNFLYLASNYEKLKGTPEEQKKKQKYVEENKSYLDEIIKQISEFSERVIKADANLQKVKAAYEKHKDKPIQEQAENIIHLFTLTALGAPAAFKYFDETIDRKRYTSTKEVLDATLIHQSITGLYETRIDLSFLGGD

SEQ ID NO: 168 - protein, 1368 aa, synthetic construct
MDKKYSIGLDIGTNSVGWAVITDEYKVPSKKFKVLGNTDRHSIKKNLIGALLFDSGETAEATRLKRTARRRYTRRKNRICYLQEIFSNEMAKVDDSFFHRLEESFLVEEDKRNERHPIFGNIVDEVAYHEKYPTIYHLRKHLADSTEKADLRLVYLALAHIIKFRGHFLIEGDLNSENSDVQKLFKQFVQTYNQTFEENPLNEETVDAESILTEKLSKSRRLENLIAQFPNEKKNGLFGNLIALSLGLTPNFKSNFDLSEDAKLQFSKDTYDEDLENLLGQIGDEYADLFLAAKNLYDAILLSGILTVNDESTKAPLSASMIKRYDEHHQDLTLLKAFVREQLPEKYKEIFFDKSKNGYAGYIDGGASQEEFYKYIKPILEKLDGSEYFLEKIEREDFLRKQRTFDNGSIPHQIHLGELHAILRRQEEYYPFLKENQEKIEKILTFRIPYYVGPLARGNSRFAWATRKSDETITPWNFEEVIDKEASAQAFIERMTNNDKNLPDEKVLPKHSLLYEKFTVYNELTKVKYVTEGMGKPEFFSANQKEEIVDLLFKKERKVTKKKLLEFLFKEFEEFRIVDISGVEDAFNASLGTYHDLLKIIKDKDFLDNEENEDILEDIVLTLTLFEDREMIEKRLEKYADLFDKKVLKKLKRRRYTGWGRLSRKLINGIRDKQSGKTILDYLIDDGFANRNFMQLIHDDSLSFKEEIKKAQVIGDTDSLHEHIANLAGSPAIKKGILQTVKVVDELVKVMGRHKPENIVIEMARENQTTQKGQRNSRERLKRLEEGIKELGSDILKEHPVENTQLQNDKLYLYYLQNGKDMYTGEELDIDRLSDYDVDHIIPQSFIKDDSIDNRVLTSSAKARGKSDNVPSEEVVKKMKSFWYKLLKAKLISQRKFDNLTKAERGGLSELDKAGFIKRQLVETRQITKHVAQILDSRMNTKYDENDKLIREVKVITLKSKLVSDFRKDFQFYKVREINNYHHAHDAYLNAVVGTALIKKYPKLESEFVYGDYKVYDVRKMIAKSEQEIGKATAKYFFYSNIMNFFKTEITLANGEIRKRPLIETNGETGEIVWDKGRDFATVRKVLSMPQVNIVKKTEVQTGGFSKESILPKRDSDKLIARKKDWDTKKYGGFDSPTVAYSVLVVAKIEKGKAKKLKTVKELVGITIMERSSFEKNPVAFLEAKGYQNIQKDKIIKLPKYSLFELENGRKRLLASAGELQKGNELALPQKYVTLLYHAKHYEKLKGKPEDEEQHLEYVEQHRDEFDEILEQISEFSERYILADKNLEKIEELYEKNENFSIEELAESFINLLTLTALGAPAAFKFLGTTIDRKRYTSTTEILNSTLIHQSITGLYETRIDLSKLGGD

SEQ ID NO: 169 - protein, 1368 aa, synthetic construct
MDKKYSIGLDIGTNSVGWAVITDEYKVPSKKFKVLGNTDRHSIKKNLIGALLFDSGETAEATRLKRTARRRYTRRKNRICYLQEIFSNEMAKVDDSFFHRLEESFLVPEDKRNERHPIFGNIVDEVAYHEKYPTIYHLRKKLADSDEKADLRLIYLALAHMIKFRGHFLIEGDLNSDNSDVQKLFKQLVQTYNQLFEESPLNEEGVDAKAILSARLSKSRRLENLIAQFPGEKKNGLFGNLIALSLGLTPNFKSNFDLAEDAKLQLSKDTYDEDLENLLGQIGDQYADLFLAAKNLYDAILLSGILTVNDESTKAPLSASMVKRYDEHHKDLKLLKKLVRQQLPEKYKEIFSDKSKNGYAGYIDGKTSQEEFYKYIKPILEKVDGSEEFLEKINREDFLRKQRTFDNGSIPHQIHLQELHAILRRQEKYYPFLKENREKIEKILTFRIPYYVGPLARGNSRFAWMSRKSDEKITPWNFDEVVDKEASAQAFIERMTNNDLYLPDEKVLPKHSLLYEKFTVYNELTKVKYVTEGMRKPQFLSAEQKQEIVDLLFKKNRKVTVKKLKEDYFKKFECFDSVEISGVEDRFNASLGTYHDLLKIIKDKDFLDNEENEKILEDIVLTLTLFEDREMIEERLKKYADLFDDKVLKQLKRRHYTGWGRLSAKLINGIRDKQSGKTILDYLISDGFANRNFMQLIHDDSLTFKEEIEKAQVSGQGDSLHEHIANLAGSPAIKKGILQTVKVVDELVKVMGRHKPENIVIEMARENQTTQKGQRNSRQRLKRLEEGIKELGSDILKEYPVENTQLQNDRLYLYYLQNGKDMYTGEELDIDRLSQYDIDHIIPQSFIKDDSIDNKVLVSSAKARGKSDNVPSEEVVKKMKNYWRQLLDAKLISQRKFDNLTKAERGGLSELDKAGFIKRQLVETRQITKHVAQILDSRMNTKYDENDKLIREVKVITLKSKLVSDFRKDFQFYKVREINNYHHAHDAYLNAVVGTALIKKYPKLESEFVYGDYKVYDVRKMIAKSEQEIGKATAKYFFYSNIMNFFKTEITLANGEIRKRPLIETNGETGEIVWDKGRDFATVRKVLSMPQVNIVKKTEVQTGGFSKESILPKRNSDKLIARKKDWDPKKYGGFDSPTVAYSVLVVAKVEKGKSKKLKSVKELLGITIMERSSFEKNPIDFLEAKGYKEVKKDLIIKLPKYSLFELENGRKRMLASAGELQKGNELALPSKYVNFLYLASHYEKLKGSPEDNEQKQLFVEQHKHYLDEIIEQISEFSKRVILADANLDKVLSAYNKHRDKPIREQAENIIHLFTLTNLGAPAAFKYFDTTIDRKRYTSTKEVLDATLIHQSITGLYETRIDLSQLGGD

SEQ ID NO: 170 - protein, 1368 aa, synthetic construct
MDKSYSIGLDIGTNSVGWAVITDEYKVPSKKFKVLGNTGRKSIKKNLLGALLFDSGETAEATRLKRTARRRYTRRKNRICYLQEIFSNEMAKVDDSFFHRLEESFLVEEDKKHERHPIFGNIVDEVAYHEKYPTIYHLRKKLVDSTDKADLRLIYLALAHMIKFRGHFLIEGDLNPDNSDVDKLFIQLVQTYNQLFEENPINASGVDAKAILSARLSKSRRLENLIAQLPGEKKNGLFGNLIALSLGLTPNFKSNFDLAEDAKLQLSKDTYDDDLDNLLAQIGDQYADLFLAAKNLSDAILLSDILRVNTEITKAPLSASMIKRYDEHHQDLTLLKALVRQQLPEKYKEIFFDQSKNGYAGYIDGGASQEEFYKFIKPILEKMDGTEELLVKLNREDLLRKQRTFDNGSIPHQIHLGELHAILRRQEDFYPFLKDNREKIEKILTFRIPYYVGPLARGNSRFAWMTRKSEETITPWNFEEVVDKGASAQSFIERMTNFDKNLPNEKVLPKHSLLYEYFTVYNELTKVKYVTEGMRKPAFLSGEQKKAIVDLLFKTNRKVTVKQLKEDYFKKIECFDSVEISGVEDRFNASLGTYHDLLKIIKDKDFLDNEENEDILEDIVLTLTLFEDREMIEERLKTYAHLFDDKVMKQLKRRRYTGWGRLSRKLINGIRDKQSGKTILDFLKSDGFANRNFMQLIHDDSLTFKEDIQKAQVSGQGESLHEQIANLAGSPAIKKGILQTIKIVDEIVKVMGRYAPENIVIEMARENQTTQKGQKNSRERMKRIEEGIKELGSQILKEHPVENTQLQNEKLYLYYLQNGRDMYVDQELDINRLSDYDVDHIVPQSFLKDDSIDNKVLTRSDKARGKSDNVPSEEVVKKMKNYWRQLLNAKLITQRKFDNLTKAERGGLTELDKAGFIKRQLVETRQITKHVAQILDERFNTEYDDNGKLIRDTKIVTLKSKLVSQLRKDFGLYKIREVNNYHHAHDAYLNAVVGKALIKKYPKLESEFVYGDYPVYDVAKLVKKSDKEIGKATAKMFFYSNLMNFFKSDVSLADGTLKKRPLIEVNEETGEIIWDKEKHIETIKKVLSMPQVNIVKKTEVQTGGFSKESILPKRNSDKLIARKKDWDPKKYGGFDSPTVAYSVLVVAKVEKGKSKKLKSVKELLGITIMERSSFEKNPIDFLEAKGYKEVKKDLIIKLPKYSLFELENGRKRMLASAGELQKGNELALPSKYVNFLYLASHYEKLKGSPEDNEQKQLFVEQHKHYLDEIIEQISEFSKRVILADANLDKVLSAYNKHRDKPIREQAENIIHLFTLTNLGAPAAFKYFDTTIDRKRYTSTKEVLDATLIHQSITGLYETRIDLSQLGGD

SEQ ID NO: 171 - protein, 1368 aa, synthetic construct
MDKKYSIGLDIGTNSVGWAVITDEYKVPSKKFKVLGNTDRHSIKKNLIGALLFDSGETAEATRLKRTARRRYTRRKNRICYLQEIFSNEMAKVDDSFFHRLEESFLVEEDKRGERHPIFGNIVEEVAYHEKYPTIYHLRKHLADSTEKADLRLIYLALAHIIKFRGHFLIEGDLNSENTDVQKLFIQFVQTYNQTFEENPLSEETVDAKSILTAKLSKSRKLENLIAQFPNEKKNGLFGNLIALSLGLTPNFKSNFELSEDAKLQFSKDTYDEDLENLLGQIGDEYADLFVAAKNLYDAILLSGILTVNDESTKAPLSASMIKRYDEHHQDLTLLKKFVRQQLPEKYKEIFFDESKNGYAGYIDGGASQEEFYKYIKPILSKVDGAEYFLEKIEREDFLRKQRTFDNGSIPHQIHLQELHAILRRQEEFYPFLKENQEKIEKILTFRIPYYVGPLARGNSRFAWMTRKSDETITPWNFEEVVDKEASAEAFIERMTNFDKNLPDEKVLPKHSLLYEKFTVYNELTKVKYVTEGMGKPEFFSANQKQEIFDELFKKNRKVTKKKLLEFLFKEFECFRIVEISGVEDAFNASLGTYHDLLKIIKDKDFLDNEENEDILEDIVLTLTLFEDREMIEKRLSKYADLFDKKVLKKLKRRRYTGWGRLSKKLINGIRDKQSGKTILDYLIDDGFANRNFMQLIHDDSLTFKEEIKKAQVIGQGDSLHEHIANLAGSPAIKKGILQTVKVVDELVKVMGRHKPENIVIEMARENQTTQKGQRNSRERLKRLEEAIKELGSDILKEHPVENTQLQNDKLYLYYLQNGKDMYTGEELDIDRLSDYDVDHIIPQSFIKDDSIDNRVLTSSAKARGKSDNVPSEEVVKKMKSFWEQLLKAKLISQRKFDNLTKAERGGLSELDKAGFIKRQLVETRQITKHVAQILDSRMNTKYDENDKLIREVKVITLKSKLVSDFRKDFQFYKVREINNYHHAHDAYLNAVVGTALIKKYPKLESEFVYGDYKVYDVRKMIAKSEQEIGKATAKYFFYSNIMNFFKTEITLANGEIRKRPLIETNGETGEIVWDKGRDFATVRKVLSMPQVNIVKKTEVQTGGFSKESILPKRDSDKLIARKKDWDTKKYGGFDSPTVAYSVLVVADVEKGKSKKLKTVKELVGITIMERSAFEKNPVAFLEDKGYQNIQKDLIIKLPKYSLFELENGRKRLLASAGELQKGNELALPNKYVTLLYHAKHYEKLKGKPEDEEKHREYVEKHRDEFDEILDQISEFSKRYILADKNLEKILELYSKNENYSIEELASSFINLLTFTALGAPAAFKFFGSTIDRKRYTSTKEILNATLIHQSITGLYETRIDLSKLGGD

SEQ ID NO: 172 - protein, 1368 aa, synthetic construct
MDKSYSIGLDIGTNSVGWAVITDEYKVPSKKFKVLGNTDRHSIKKNLLGALLFDSGETAEATRLKRTARRRYTRRKNRILYLQEIFAEEMSKVDDSFFHRLEESFLVEEDKRGERHPIFGNIVDEVAYHENYPTIYHLRKKLADSTEKADLRLIYLALAHIIKFRGHFLIEGDLNSENTDVQKLFKQLVQTYDQLFEESHLSEETVDASDILTAKLSKSRRLENLIAQFPNEKKNGLFGNLIALSLGLTPNFKSNFKLSEDAKLQFSKDTYDEDLENLLAQIGDQYADLFLAAKNLSDAILLSGILTVNTEITKAPLSASMIKRYDEHHQDLTLLKKLVRKQLPEKYKEIFFDDSKNGYAGYIDGGASQEEFYKYIKPILSKLDGSEYFLDKIEREDFLRKQRTFDNGSIPHQIHLQELHAILRRQEKFYPFLKENQEKIEKILTFRIPYYVGPLARGNSRFAWMSRKSDETITPWNFDEVVDKEASAQAFIERMTNNDKNLPNEKVLPKHSLLYEKFTVYNELTKVKYITEGMRKPAFFSAEQKQEIVDLLFKKNRKVTVKKLKEYLFKKIECFDSVEISGVEDAFNASLGTYHDLLKIIKDKDFLDNEENEKILEDIVLTLTLFEDREMIEQRLSKYADLFDKKVLKKLKRRRYTGWGRLSAKLINGIRDKQSGKTILDYLIDDGFANRNFMQLIHDDSLTFKEEIEKAQVIGKGDSLHEVIANLAGSPAIKKGILQSLKIVDELVKVMGRHNPENIVIEMARENQTTQKGQKNSRERLKRLEESIKELGSKILKEHPVDNTQLQNDKLYLYYLQNGKDMYTGEELDIDRLSDYDVDHIIPQSFIKDDSIDNRVLTSSEKARGKSDNVPSIEVVKKMKSFWRKLLNAKLISQRKFDNLTKAERGGLSELDKAGFIKRQLVETRQITKHVAQILDSRFNTKYDENDKLIRKVKIITLKSKLVSDFRKEFGFYKVREINDYHHAHDAYLNAVVGTALIKKYPKLESEFVYGDYPVYDSYKMIAKSEQEIGKATAKYFFYSNIMNFFKSEITLANGEIRKRPLIETNEETGEIVWDKEKDFATVKKVLSMPQVNIVKKTEVQTGGFSKESILPKRNSDKLIARKKDWDTKKYGGFDSPTVAYSVLVVADVEKGKSKKLKTVKELVGITIMERSSFEKNPIAFLEAKGYKNIQKELIIKLPKYSLFELENGRKRLLASAGELQKGNELALPGKYVTLLYHAKHYEKLKGSPEDNEEHREYVEQHREEFKEIFDQISEFSERYILADKNLEKILELYAENEDSSIEELASSFINLLTFTALGAPAAFKFFDQDIDRKRYTSTTEILNATLIHQSITGLYETRIDLSQLGGD

SEQ ID NO: 173 - protein, 1368 aa, synthetic construct
MDKKYSIGLDIGTNSVGWAVITDEYKVPSKKFKVLGNTDRHSIKKNLLGALLFDSGETAEATRLKRTARRRYTRRKNRIRYLQEIFAEEMAKVDDSFFHRLEESFLVEEDKRHERHPIFGNIVDEVAYHEKYPTIYHLRKKLADSTDKADLRLIYLALAHMIKFRGHFLIEGDLNPDNSDVQKLFYQLVQTYNQLFEESPIDISGVDAKAILSAKLSKSRRLENLIAQFPGEKKNGLFGNLIALSLGLTPNFKSNFDLAEDAKLQLSKDTYDEDLDNLLAQIGDQYADLFLAAKNLSDAILLSDILTVNSEVTKAPLSASMIKRYDEHHQDLTLLKELVRQQLPEKYKEIFFDQTKNGYAGYIDGGASQEEFYKYIKPILEKMDGTEDLLSKLNREDFLRKQRTFDNGSIPHQIHLNELHAILRRQEDFYPFLKENQEKIEKILTFRIPYYVGPLARGNSRFAWLTRKSEETITPWNFEEVVDKGASAQSFIERMTNFDKNLPHEKVLPKHSLLYEYFTVYNELTKVKYVTEGMRKPEFLSAGQKEAIVDLLFKTNRKVTVKQLKEDYFKKIECFDTVEISGVEDKFNASLGTYHDLLKIIKDKDFLDNEENEDILEDIVLTLTLFEDREMIEERLEKYAHLFDKKVLKQLKRRRYTGWGRLSRKLINGIRDKQSGKTILDFLKSDGFANRNFMQLIHDDSLTFKEAIKKAQVIGQGDSLHEQIANLAGSPAIKKGILQSVKIVDELVKVMGRHKPENIVIEMARENQTTQKGQKNSRERMKRIEEGIKELGSQILKEHPVENTQLQNEKLYLYYLQNGRDMYVDQELDINRLSDYDVDHIVPQSFLKDDSIDNKVLTRSDKARGKSDNVPSEEVVKKMKNYWRQLLNAKLITQRKFDNLTKAERGGLSELDKAGFIKRQLVETRQITKHVAQILDSRMNTKYDENDKLIREVKVITLKSKLVSDFRKDFQFYKVREINDYHHAHDAYLNAVVGTALIKKYPKLESEFVYGDYKVYDVRKMIAKSEQEIGKATAKYFFYSNIMNFFKSEVTLANGEIRKRPLIEMNEETGEIVWDKGKDFATVRKVLSMPQVNIVKKTEVQTGGFSKESILPKRNSDKLIARKKDWDPKKYGGFDSPTVAYSVLVVAKVEKGKSKKLKSVKELVGITIMERSSFEKNPVDFLEAKGYKNIQKDLIIKLPKYSLFELENGRKRLLASAGELQKGNELALPQKYVTFLYHAKNYEKIKGSEEDREKKLEYVEQHRHEFDEILSQIEEFSKRYILADKNLSKIKELYNNEADKSISELAENFIHLFTFTSLGAPAAFKFFDTTIDRKRYTSTTEVLDATLIHQSITGLYETRIDLSQLGGD

SEQ ID NO: 174 - protein, 1368 aa, synthetic construct
MKKPYSIGLDIGTNSVGWAVVTDDYKVPAKKMKVLGNTDKSHIKKNLLGALLFDSGNTAEDRRLKRTARRRYTRRRNRILYLQEIFAEEMNKVDDSFFHRLDDSFLVTEDKRGERHPIFGNLAEEVKYHENFPTIYHLRKHLADSPEKADLRLVYLALAHIIKYRGHFLIEGKLDTENKDVQELFQEFLAVYDNTFEDSSLQDQNVQIEEILTDKISKSAKKDRVLKLFPNEKSNGFFAEFLKLIVGNQADFKKNFELEEKAPLQFSKDSYEEDLEVLLGQIGDNYADLFVAAKKLYDSILLSGILTVNDVSTKAPLSASMIQRYEEHQEDLAQLKCFIRKKLSEKYNEVFSDKSKDGYAGYIDGKTNQEAFYKYLKKLLNKVEGSGYFLEKIEREDFLRKQRTFDNGSIPHQIHLQEMRAIIRRQAEYYPFLAENQDKIEQILTFRIPYYVGPLARGKSDFAWLSRKSDEKITPWNFDEIVDKESSAEAFINRMTNYDLYLPEQKVLPKHSLLYEKFTVYNELTKVRYKTEQMGKTHFFDANMKQEIFDGVFKKYRKVTKKKLMDFLHKEFDEFRIVDLTGLDKQFNASYGTYHDLLKILQDKDFLDDPKNEKILEDIVLTLTLFEDREMIRKRLSKYSDLLTKEQVKKLERRHYTGWGRLSAKLINGIRNKETRKTILDYLIDDGNSNRNFMQLINDDALSFKEEIAKAQVIGETDNLNQVVQDLAGSPAIKKGILQSLKIVDELVKIMGRYNPENIVVEMARENQFTNQGRRNSQQRLKGLTDSIKELGSQILKEHPVDNSQLQNDRLFLYYLQNGRDMYTGEELDIDKLSQYDIDHIIPQAFIKDDSIDNRVLVSSAKARGKSDDVPSKEVVKKMKSFWQKLLDAKLISQRKFDNLTKAERGGLTDDDKAGFIKRQLVETRQITKHVARILDERFNTETDENNKKIRKVKIVTLKSNLVSNFRKEFELYKVREINDYHHAHDAYLNAVVAKALLGKYPKLEPEFVYGEYPKYNSYRYVDETNKERKKATAKMFFYSNIMNFFKSDVKLADGSVVERPMIEVNNETGEIVWDKTKHISTVKKVLSYPQVNIVKKVEEQTGGFSKENILPKGNSDKLIPRKTKWDTKKYGGFDSPIVAYSVLVIADIEKGKAKKLKTVKELIGITIMEKMTFEKDPVAFLERKGYQNIQEENIIKLPKYSLFELENGRRRLLASARELQKGNEIVLPNHLVTLLYHAKNIDKVSEKAKDVPKHLQYVEKHRSEFKELLDEIMNFSKKYTLAEANLEKIIELYADNNQASIEEIASSFINLLTFTALGAPAAFKFLDKNIDRKRYTSTTEILNATLIHQSITGLYETRIDLSKLGED

SEQ ID NO: 175 - protein, 1368 aa, synthetic construct
MDKKYSIGLDIGTNSVGWAVITDEYKVPSKKFKVLGNTDRHSIKKNLIGALLFDSGETAEATRLKRTARRRYTRRKNRICYLQEIFSNEMAKVDPSFFQRLEESFLVEEDKRGERHPIFGNIVEEVAYHEKYPTIYHLRKELADSDEKADLRLVYLALAHMIKFRGHFLIEGDLDAENSDVQKLFLTLIETYDQTFEESPLEEEEIDAEAILTEKLSKSRRLENLIAKFPGEKKNSLFGNLIGLALGLTPNFKSNFDLSEDAKLQFSKDTYDEDLEELLGQIGDEYADLFLAAKNLYDAILLSGILTVDDNSTKAPLSASMVKRYDEHHQDLTLLKEFVRKQLPEKYKEIFFDQTKNGYAGYIDGGASQEEFYKYLKKLLEKIDGSEYFLDKIEREDFLRKQRTFDNGSIPHQIHLQELHAILRRQEEYYPFLKENQEKIEKILTFRIPYYVGPLARGNSRFAWMSRKSDETITPWNFDDVVDKEKSAEKFIERMTNFDKNLPEEKVLPKHSLLYEKFTVYNELTKVKYVTEGGKKPKFFDAELKQEIFDDLFKKERKVTKKQLLEYLYKEFDEFRIVEISGVEDRFNASLGTYHDLLKIIKDKSFLDNSENEEILEDIILTLTLFEDREMIKKRLEKYSDLFDKKQLKKLSRRRYTGWGRLSAKLINGIRDKQTGKTILDYLIDDGFTNRNFMQLIHDDNLTFKEEISKAQVIKDTDSLHEHIANLAGSPAIKKGILQTVKVVDELVKVMGRHKPENIVIEMARENQTTQKGQKNSRERMKRIEEGIKELGSQILKEHPVENTQLQNEKLYLYYLQNGRDMYVDQELDINRLSDYDVDHIVPQSFLKDDSIDNKVLTRSDKARGKSDNVPSEEVVKKMKNYWRQLLNAKLITQRKFDNLTKAERGGLSELDKAGFIKRQLVETRQITKHVAQILDSRMNTKYDENDKLIREVKVITLKSKLVSDFRKDFQFYKVREINNYHHAHDAYLNAVVGTALIKKYPKLESEFVYGDYKVYDVRKMIAKSEQEIGKATAKYFFYSNIMNFFKTEITLANGEIRKRPLIETNGETGEIVWDKGRDFATVRKVLSMPQVNIVKKTEVQTGGFSKESILPKRNSDKLIARKKDWDPKKYGGFDSPTVAYSVLVVAKVEKGKSKKLKSVKELLGITIMERSSFEKNPIDFLEAKGYKEVKKDLIIKLPKYSLFELENGRKRMLASAGELQKGNELALPSKYVNFLYLASHYEKLKGSPEDNEQKQLFVEQHKHYLDEIIEQISEFSKRVILADANLDKVLSAYNKHRDKPIREQAENIIHLFTLTNLGAPAAFKYFDTTIDRKRYTSTKEVLDATLIHQSITGLYETRIDLSQLGGD

SEQ ID NO: 176 - protein, 1368 aa, synthetic construct
MDKKYSIGLDIGTNSVGWAVITDEYKVPSKKFKVLGNTDRHSIKKNLIGALLFDSGETAEATRLKRTARRRYTRRKNRICYLQEIFSNEMAKVDDSFFHRLEESFLVEEDKRHERHPIFGNIVDEVAYHEKYPTIYHLRKELADSTEKADLRLVYLALAHIIKFRGHFLIEGDLNPENTDVQKLFIQFVQTYNRTFEESPLSEETVDAKSILTEKLSKSRRLENLIAQFPNEKKNGLFGNLIALSLGLTPNFKSNFELSEDAKLQFSKDTYDEDLENLLGQIGDEYADLFLAAKNLYDAILLSGILTVNDESTKAPLSASMIKRYDEHHQDLTLLKAFVREQLPEKYKEIFFDKSKNGYAGYIDGGASQEEFYKYIKKILEKIDGSEYFLAKIEREDFLRKQRTFDNGSIPHQIHLGELHAILRRQGEYYPFLKENQEKIEKILTFRIPYYVGPLARGNSRFAWMSRKSDETITPWNFEEVVDKEASAEAFIERMTNFDKNLPEEKVLPKHSLLYEKFTVYNELTKVKYVTEGMGKAEFFDANMKQEIFDGLFKKNRKVTKKKLLDFLDKEFDEFRIVDISGVEKAFNASLGTYHDLLKIIKDKDFLDNEENEDILEDIILTLTLFEDREMIEERLSKYADLFDKKVLKKLERRRYTGWGRLSAKLINGIRDKQSGKTILDYLIDDGNANRNFMQLIHDDSLTFKEEIKKAQVIGESDSLHEHIANLAGSPAIKKGILQTVKVVDELVKVMGRHKPENIVIEMARENQTTQKGQKNSRERMKRIEEGIKELGSQILKEHPVENTQLQNEKLYLYYLQNGRDMYVDQELDINRLSDYDVDHIVPQSFLKDDSIDNKVLTRSDKARGKSDNVPSEEVVKKMKNYWRQLLNAKLITQRKFDNLTKAERGGLSELDKAGFIKRQLVETRQITKHVAQILDSRMNTKYDENDKLIREVKVITLKSKLVSDFRKDFQFYKVREINNYHHAHDAYLNAVVGTALIKKYPKLESEFVYGDYKVYDVRKMIAKSEQEIGKATAKYFFYSNIMNFFKTEITLANGEIRKRPLIETNGETGEIVWDKGRDFATVRKVLSMPQVNIVKKTEVQTGGFSKESILPKRDSDKLIARKKDWDTKKYGGFDSPTVAYSVLVVADIEKGKAKKLKTVKELVGITIMERSAFEKDPVAFLEDKGYQNVQEDKIIKLPKYSLFELENGRKRLLASAGELQKGNELALPNKYVTLLYHAKHYEKLKEKPEDEEKHLEYVDKHRDEFDEILDQISEFSERYILADKNLEKIKELYAKFESYSIEELASSFINLLTFTALGAPAAFKFLGSTIDRKRYTSTKEILNATLIHQSITGLYETRIDLSKLGGD

SEQ ID NO: 177 - protein, 1368 aa, synthetic construct
MKKKYSIGLDIGTNSVGWAVITDEYKVPSKKFKVLGNTDRQSIKKNLLGALLFDSGETAEATRLKRTARRRYTRRKNRIRYLQEIFAEEMSKVDDSFFHRLEESFLVEEDKKHERHPIFGNIVDEVAYHEKYPTIYHLRKKLADSTEKADLRLIYLALAHIIKFRGHFLIEGDLNSENTDVQKLFIQLVQTYNQLFEENPINEEGIDAKAILTAKLSKSRRLENLIAQLPGEKRNGLFGNLIALSLGLTPNFKSNFDLAEDAKLQLSKDTYDEDLDNLLAQIGDQYADLFLAAKNLSDAILLSDILTVNDEITKAPLSASMIKRYDEHHQDLTLLKALVRQQLPEKYKEIFFDQSKNGYAGYIDGGASQEEFYKYIKPILEKMDGTEELLAKLNREDFLRKQRTFDNGSIPHQIHLGELHAILRRQEDFYPFLKENQEKIEKILTFRIPYYVGPLARGNSRFAWMSRKSEETITPWNFEEVVDKEASAQAFIERMTNFDKNLPSEKVLPKHSLLYEKFTVYNELTKVKYVTEGMRKPHFLSSEQKEEIVDLLFKKNRKVTVKQLKEDYFSKIECFDSVEISGVEDKFNASLGTYHDLLKIIKDKDFLDNEENEDILEDIVLTLTLFEDKEMIEERLAKYAHLFDKKVMKKLKRRRYTGWGRLSRKLINGIKDKQSGKTILDFLKSDGFANRNFMQLIHDDSLTFKEEIEKAQVKGQGESLHEQIANLAGSPAIKKGILQSVKIVDELVKVMGRHAPENIVIEMARENQTTQKGQKNSRERMKRIEEGIKELGSQILKEHPVENTQLQNEKLYLYYLQNGRDMYVDQELDINRLSDYDVDHIVPQSFLKDDSIDNKVLTRSDKARGKSDNVPSEEVVKKMKNYWRQLLNAKLITQRKFDNLTKAERGGLSELDKAGFIKRQLVETRQITKHVAQILDSRFNTEFDENNKLIREVKIITLKSKLVSDFRKDFGFYKVREINDYHHAHDAYLNAVVGTALIKKYPKLESEFVYGDYKVYDVRKLIAKSEQEIGKATAKYFFYSNIMNFFKSEVTLANGEIRKRPLIETNEETGEIVWDKEKDFATVKKVLSMPQVNIVKKTEVQTGGFSKESILPKRNSDKLIARKKDWDTKKYGGFDSPTVAYSVLVVAKVEKGKAKKLKSVKELVGITIMERSSFEKDPIAFLEDKGYKNVQKDLIIKLPKYSLFELENGRKRLLASAGELQKGNELALPNKYVNFLYHASHYEKLKGKSEDNEKKRLYVEEHRHYFDEIFEQIIEFSERYILADANLEKIKSLFKENEDKSISELAENFIHLFTLTALGAPAAFKFFDKDIDRKRYTSTTEILNATLIHQSITGLYETRIDLSQLGGD

SEQ ID NO: 178 - protein, 1368 aa, synthetic construct
MKKPYSIGLDIGTNSVGWAVVTDDYKVPSKKMKVLGNTDRSSIKKNLLGALLFDSGETAEATRLKRTARRRYTRRKNRILYLQEIFAEEMNKVDESFFHRLEDSFLVEEDKRGERHPIFGTIVEEVKYHEEFPTIYHLRKHLADSPEKADLRLVYLALAHIIKFRGHFLIEGDLDTENTDVQSLFKEFLEVYDETFENSHLSEETVDVEEILTDKISKSRKKERLLKLFPTEKSNGQFAEFLKLIVGNQANFKKVFELSEKAKLQFSKDTYEEDLEILLGKIGDEYADVFVSAKNLYDSILLSGILTVTDLSTKAPLSASMVKRYEEHHEDLTKLKKFIRENLPEKYKEVFFDESKNGYAGYIDGGTKQEDFYKYLKKLLSKIAGSEYFLEKIEREDFLRKQRTFDNGSIPHQIHLQEMKAIIRRQAEYYPFLKENQDKIEQILTFRIPYYVGPLARGNSRFAWASRKSDETITPWNFDDIIDKEKSAEAFINRMTNYDLYLPEEKVLPKHSLLYEKFTVYNELTKVKYITEQGGKTEFFDANMKQEIFDGVFKKERKVTKKKLLNFLDKEFDEFRIVDLSGVEKAFNASLGTYHDLKKILGDKEFLDDPENEGMLEDIVLTLTLFEDREMIKKRLEKYSDIFTKEQLKKLERRHYTGWGRLSAKLINGIRDKETNKTILDYLIDDGYSNRNFMQLIHDDALSFKEEIAKAQVIGETDSLHEVVAELAGSPAIKKGILQSLKIVDELVKVMGRYNPENIVVEMARENQTTNKGQRNSRERLKGLTDAIKELGSDILKEHPVDNQQLQNDRLYLYYLQNGKDMYTGETLDIDNLSQYDVDHIIPQSFIKDDSIDNRVLVSSAKARGKSDDVPSIEVVHKMKSFWNKLLNAKLISQRKYDNLTKAERGGLTDDDKAGFIKRQLVETRQITKHVAQILDERFNTERDENNKLIRKVKIVTLKSKLVSNFRKDFELYKVREINDYHHAHDAYLNAVVGKALITKYPQLEPEFVYGDYPKFNSYKLFRKKDSERGKATAKMFFYSNLMNFFKSDVKLADGTVVERPIIEVNDENGEIAWKKTKHVSNVKKVLSMPQVNIVKKTEVQTGGFSKESILPKRNSDKLIARKKKWDTKKYGGFDSPIVAYSVLVIADIEKGKAKKLKTVKELVGITIMEKSRFEKDPVAFLENKGYQNIQEENIIKLPKYSLFSLENGRKRLLASAGELQKGNELALPNHLVTLLYHAKNIEKDDEKKKDIPKHLEYVKKHRSEFKELFDQVSEFSKRYILADKNLEKIEELYTQNEEADVKELASSFINLLTFTAIGAPADFKFFGKDIDRKRYTSTTECLNATLIHQSITGLYETRIDLSKLGED

SEQ ID NO: 179 - protein, 1368 aa, synthetic construct
MDKKYSIGLDIGTNSVGWAVITDEYKVPSKKFKVLGNTDRHSIKKNLIGALLFDSGETAEATRLKRTARRRYTRRKNRICYLQEIFSNEMAKVDDSFFHRLEESFLVEEDKKHERHPIFGNIVDEVAYHEKYPTIYHLRKKLADSTEKADLRLIYLALAHIIKFRGHFLIEGDLNPENSDVDKLFIQLVQTYNQLFEENPINESGVDAKAILSAKLSKSRRLENLIAQFPGEKKNGLFGNLIALSLGLTPNFKSNFDLAEDAKLQLSKDTYDEDLDNLLAQIGDQYADLFLAAKNLSDAILLSDILTVNSEITKAPLSASMIKRYDEHHQDLTLLKALVRQQLPEKYKEIFFDKSKNGYAGYIDGGASQEEFYKYIKPILEKMDGTEELLAKLNREDFLRKQRTFDNGSIPHQIHLGELHAILRRQEEFYPFLKENREKIEKILTFRIPYYVGPLARGNSRFAWMTRKSDETITPWNFEEVVDKGASAQAFIERMTNFDKNLPNEKVLPKHSLLYEYFTVYNELTKVKYVTEGMRKPEFLSGEQKEEIVDLLFKKNRKVTVKQLKDDYFKEIECFDSVEISGVEDAFNASLGTYHDLLKIIKDKDFLDNEENEDILEDIVLTLTLFEDREMIEERLKKYANLFDDKVLKQLKRRRYTGWGRLSRKLINGIRDKQSGKTILDFLKSDGFANRNFMQLIHDDSLTFKEEIKKAQVSGQGDSLHEHIANLAGSPAIKKGILQTVKVVDELVKVMGRHKPENIVIEMARENQTTQKGQKNSRERMKRIEEGIKELGSQILKEHPVENTQLQNEKLYLYYLQNGRDMYVDQELDINRLSDYDVDHIVPQSFLKDDSIDNKVLTRSDKARGKSDNVPSEEVVKKMKNYWRQLLNAKLITQRKFDNLTKAERGGLSELDKAGFIKRQLVETRQITKHVAQILDSRMNTKYDENDKLIREVKVITLKSKLVSDFRKDFQFYKVREINNYHHAHDAYLNAVVGTALIKKYPKLESEFVYGDYKVYDVRKMIAKSEQEIGKATAKYFFYSNIMNFFKTEITLANGEIRKRPLIETNGETGEIVWDKGRDFATVRKVLSMPQVNIVKKTEVQTGGFSKESILPKRNSDKLIARKKDWDTKKYGGFDSPTVAYSVLVVAKVEKGKSKKLKTVKELVGITIMERSSFEKDPVAFLEAKGYKNVQKDLIIKLPKYSLFELENGRKRMLASAGELQKGNELALPSKYVTLLYHASNYEKLKGKPEDEEKKLEYVEQHRHYFDEIFDQISEFSERYILADKNLEKILSLYNKFEDKSIREQAENFINLFTLTALGAPAAFKFFGTTIDRKRYTSTKEILNSTLIHQSITGLYETRIDLSQLGGD

SEQ ID NO: 180 - protein, 1368 aa, synthetic construct
MKKPYSIGLDIGTNSVGWAVVTDDYKVPSKKMKVLGNTDRSSIKKNLLGALLFDSGETAEATRLKRTARRRYTRRKNRILYLQEIFAEEMNKVDDSFFHRLEDSFLVEEDKRGERHPIFGNIVDEVAYHEKFPTIYHLRKHLADSTEKADLRLVYLALAHIIKFRGHFLIEGDLDSENTDVQKLFKQFVEAYDRTFEESHLSEETVDAEAILTEKISKSRKLENLLKQFPNEKKNGFFGNLIALSLGLQPNFKKNFGLSEDAKLQFSKDTYDEDLENLLGQIGDEYADLFVAAKNLYDAILLSGILTVNDSSTKAPLSASMIKRYDEHHEDLTLLKKFIRKQLPEKYKEIFFDESKNGYAGYIDGGTSQEEFYKYIKPILSKIDGSEYFLDKIEREDFLRKQRTFDNGSIPHQIHLQELKAILRRQGEYYPFLKENQEKIEKILTFRIPYYVGPLARGNSRFAWMERKSDETITPWNFDEVVDKEKSAEAFIERMTNNDLYLPEEKVLPKHSLLYEKFTVYNELTKVKYVTEGMGKAQFFDANMKQEIFDGLFKKERKVTKKKLLDFLDKEFDEFRIVDISGVEDRFNASLGTYHDLLKIIKDKDFLDNEENEEILEDIILTLTLFEDREMIKKRLEKYADLFDKKVLKKLERRHYTGWGRLSAKLINGIRDKQTGKTILDYLIDDGRANRNFMQLIHDDSLSFKEEIKKAQVIGQEDSLHEVVANLAGSPAIKKGILQSLKIVDELVKVMGRYEPENIVVEMARENQTTAKGQRNSRERLKRLEEAIKNLGSNILKEHPVENQQLQNDRLYLYYLQNGKDMYTGEELDIDKLSQYDVDHIIPQSFIKDDSIDNRVLVSSAKARGKSDDVPSIEVVKKMKSFWSKLLSAKLISQRKFDNLTKAERGGLTEEDKAGFIKRQLVETRQITKHVAQILDERFNTEFDENNKLIRKVKIITLKSKLVSDFRKEFEFYKVREINDYHHAHDAYLNAVVGKALIKKYPKLEPEFVYGDYPKYNSFKMIAKSDKERGKATAKMFFYSNIMNFFKTDVKLADGTIVERPVIEVNDETGEIVWDKEKHIATVKKVLSMPQVNIVKKTEVQTGGFSKESILPKRNSDKLIARKKKWDTKKYGGFDSPTVAYSVLVVADIEKGKSKKLKTVKELVGITIMERSRFEKNPVAFLEAKGYQNIQEEKIIKLPKYSLFELENGRKRLLASAGELQKGNELALPNKLVTLLYHAKRIEKLDEKPEDLPKHLEYVEKHKSEFDELLNQVSEFSERYILADKNLEKIEELYKQNNDSSIEELASSFINLLTFTALGAPADFKFFGTTIDRKRYTSTTEILNATLIHQSITGLYETRIDLSKLGGD

SEQ ID NO: 181 - protein, 1368 aa, synthetic construct
MDKKYSIGLDIGTNSVGWAVITDEYKVPSKKFKVLGNTDRHSIKKNLIGALLFDSGETAEATRLKRTARRRYTRRKNRICYLQEIFSNEMAKVDPSFFQRLEESFLVEEDKSGSRHPIFGNIVEEVAYHEKYPTIYHLRKKLVDSKEKADLRLIYLALAHMIKFRGHFLIEGDLNPDNSDVDKLFIQLVQTYNQLFEENPINASGVDAKAILSARLSKSRRLENLIAQLPGEKKNGLFGNLIALSLGLTPNFKSNFDLAEDAKLQLSKDTYDDDLDNLLAQIGDQYADLFLAAKNLSDAILLSDILRVDTSETRAPLSASMIKRYDDHHQDLTKLKELVRKELPEKYKTIFFDQNANGYAGYIDGGATQEEFYKAIKPILESMSGTKELLDKLEKKDLLRKQRTFDNGSIPHQIHLGELRAILERQEKFYPFLKENRERIEKILTFRIPYYVGPLARGNSRFAWMTRKSEETITPWNFEEVVDKGASAQSFIERMTNFDKNLPNEKVLPKHSLLYEYFTVYNELTKVKYVTEGMRKPAFLSGEQKKAIVDLLFKTNRKVTVKQLKEDYFKKIECFDSVEISGVEDRFNASLGTYHDLLKIIKDKDFLDNEENEDILEDIVLTLTLFEDREMIEERLKTYAHLFDDKVMKQLKRRRYTGWGRLSRKLINGIRDKQSGKTILDFLKSDGFANRNFMQLIHDDSLTFKEDIQKAQVSGQGDSLHEHIANLAGSPAIKKGILQTVKVVDELVKVMGRHKPENIVIEMARENQTTQKGQKNSRERMKRIEEGIKELGSQILKEHPVENTQLQNEKLYLYYLQNGRDMYVDQELDINRLSDYDVDHIVPQSFLKDDSIDNKVLTRSDKARGKSDNVPSEEVVKKMKNYWRQLLNAKLITQRKFDNLTKAERGGLSELDKAGFIKRQLVETRQITKHVAQILDSRMNTKYDENDKLIREVKVITLKSKLVSDFRKDFQFYKVREINNYHHAHDAYLNAVVGTALIKKYPKLESEFVYGDYKVYDVRKMIAKSEQEIGKATAKYFFYSNIMNFFKTEITLANGEIRKRPLIETNGETGEIVWDKGRDFATVRKVLSMPQVNIVKKTEVQTGGFSKESILPKRDSDKLIARKKDWDPKKYGGFDSPTVAYSVLVVAKKEVGEEKELKEVKELLGITIMERSEFEKNPLAFLEKKGYKDVKMDKIIKLPKYSLFELGNGRKRMLASAGELQKGNELALPSEYVNFLYLASDYEKLKGKEEEKKKKQEYVEKNKHYLDEIINQISEFSKRVIKADANLEKVLKAYEKHKDKPIKEQAENIIHLFTLTRLGAPAAFKYFDEVIDRKRYTSTKEVLDATLIHQSITGLYETRIDLSFLGGD

SEQ ID NO: 182 - protein, 1368 aa, synthetic construct
MDKKYSIGLDIGTNSVGWAVITDEYKVPSKKFKVLGNTDRHSIKKNLIGALLFDSGETAEATRLKRTARRRYTRRKNRICYLQEIFSNEMAKVDDSFFHRLEESFLVEEDKRNERHPIFGNIVDEVAYHEKYPTIYHLRKHLADSTEKADLRLIYLALAHIIKFRGHFLIEGDLNAENTDVQKLFEQFVQTYDNTFEESHLEEITVDAEAILTDKLSKSRRLENLIKQFPNEKKNGLFGNLIALSLGLQPNFKSNFKLSEDAKLQFSKDTYDEDLENLLGQIGDEYADLFVAAKNLYDAILLSGILTVNDVSTKAPLSASMIKRYDEHHQDLTLLKKFVRKQLPEKYKEIFFDESKNGYAGYIDGGASQEEFYKYIKPLLEKMDGSEYFLDKIEREDFLRKQRTFDNGSIPHQIHLQELHAILRRQEDYYPFLKENQEKIEKILTFRIPYYVGPLARGNSRFAWLSRKSDETITPWNFEEVVDKEASAEAFIERMTNFDKNLPEEKVLPKHSLLYEKFTVYNELTKVKYVTEGMGKPEFFDAEMKQEIFDGLFKKNRKVTKKKLLDFLFKEFDEFRIVDISGVEKAFNASLGTYHDLLKIIKDKDFLDNEENEDILEDIILTLTLFEDREMIEERLQKYADLFDKKQLKKLKRRRYTGWGRLSKKLINGIRDKQSGKTILDYLIDDGFANRNFMQLIHDDSLSFKEEIKKAQVIGQGDSLHEHIANLAGSPAIKKGILQTVKVVDELVKVMGRHKPENIVIEMARENQTTQKGQRNSRERLKRLEESIKELGSDILKEHPVENTQLQNDKLYLYYLQNGKDMYTGEELDIDRLSDYDVDHIIPQSFIKDDSIDNRVLTSSAKARGKSDDVPSEEVVKKMKSFWRQLLKAKLISQRKFDNLTKAERGGLSELDKAGFIKRQLVETRQITKHVAQILDSRMNTKYDENDKLIREVKVITLKSKLVSDFRKDFQFYKVREINNYHHAHDAYLNAVVGTALIKKYPKLESEFVYGDYKVYDVRKMIAKSEQEIGKATAKYFFYSNIMNFFKTEITLANGEIRKRPLIETNGETGEIVWDKGRDFATVRKVLSMPQVNIVKKTEVQTGGFSKESILPKRNSDKLIARKKDWDTKKYGGFDSPTVAYSVLVVAKIEKGKAKKLKTVKELVGITIMERSSFEKNPVAFLEKKGYKNIQEELIIKLPKYSLFELENGRKRLLASAGELQKGNELALPQKYVTLLYHAKNYEKLKEEPEDKEKHLEYVEEHRSEFKEILDQISEFSKRYILADKNLEKIEELYEKNENASIEELASSFINLLTFTALGAPAAFKFFGTTIDRKRYTSTKEILNATLIHQSITGLYETRIDLSKLGGD

SEQ ID NO: 183 - protein, 1368 aa, synthetic construct
MDKKYSIGLDIGTNSVGWAVITDEYKVPSKKFKVLGNTDRHSIKKNLIGALLFDSGETAEATRLKRTARRRYTRRKNRIRYLQEIFSEEMSKVDDSFFHRLEESFLVEEDKKHERHPIFGNIVDEVAYHEKYPTIYHLRKKLADSTEKADLRLIYLALAHIIKFRGHFLIEGDLNSDNSDVQKLFIQLVQTYNQLFEENPINESGVDAKAILSAKLSKSRRLENLIAQLPGEKKNGLFGNLIALSLGLTPNFKSNFDLAEDAKLQLSKDTYDDDLDNLLAQIGDQYADLFLAAKNLSDAILLSDILTVNDEITKAPLSASMIKRYDEHHQDLTLLKALVRQQLPEKYKEIFFDQSKNGYAGYIDGGASQEEFYKFIKPILEKMDGTEELLAKLNREDFLRKQRTFDNGSIPHQIHLGELHAILRRQEDFYPFLKENREKIEKILTFRIPYYVGPLARGNSRFAWMTRKSEETITPWNFEEVVDKEASAQAFIERMTNFDKNLPNEKVLPKHSLLYEYFTVYNELTKVKYVTEGMRKPEFLSGEQKEEIVDLLFKKNRKVTVKQLKEDYFKKIECFDSVEISGVEDRFNASLGTYHDLLKIIKDKDFLDNEENEDILEDIVLTLTLFEDREMIENRLKKYAHLFDKKVLKQLKRRRYTGWGRLSRKLINGIRDKQSGKTILDFLKSDGFANRNFMQLIHDDSLTFKEAIQKAQVSGQGDSLHEQIANLAGSPAIKKGILQTVKIVDELVKVMGRHKPENIVIEMARENQTTQKGQKNSRERMKRIEEGIKELGSQILKEHPVENTQLQNEKLYLYYLQNGRDMYVDQELDINRLSDYDVDHIVPQSFLKDDSIDNKVLTRSDKARGKSDNVPSEEVVKKMKNYWRQLLNAKLITQRKFDNLTKAERGGLSELDKAGFIKRQLVETRQITKHVAQILDSRFNTEYDENDKLIREVKIITLKSKLVSDFRKDFQFYKVREINNYHHAHDAYLNAVVGTALIKKYPKLESEFVYGDYKVYDVRKMIAKSEQEIGKATAKYFFYSNIMNFFKSEITLANGEIRKRPLIETNEETGEIVWDKGKDFATVRKVLSMPQVNIVKKTEVQTGGFSKESILPKRNSDKLIARKKDWDTKKYGGFDSPTVAYSVLVVAKVEKGKSKKLKTVKELVGITIMERSSFEKDPVAFLEDKGYKEIQKDLIIKLPKYSLFELENGRKRLLASAGELQKGNELALPSKYVTFLYLASHYEKLKGKPEDNEQKLEYVEQHKHYFDEIFQQISEFSERYILADKNLEKILELYNEHRDSSIVELAENFIHLFTFTALGAPAAFKFFDTTIDRKRYTSTTEILNATLIHQSITGLYETRIDLSQLGGD

SEQ ID NO: 184 - protein, 1368 aa, synthetic construct
MKKKYSIGLDIGTNSVGWAVITDEYKVPSKKFKVLGNTDRQSIKKNLLGALLFDSGETAEATRLKRTARRRYTRRKNRIRYLQEIFAEEMSKVDDSFFHRLEESFLVEEDKLYERHPIFGNIVDEVAYHEKYPTIYHLRKKLADSTEKADLRLIYLALAHIIKFRGHFLIEGDLNSDNTDVDKLFIQLVQTYNQLFEENPINEETVDAKAILSAKLSKSRRLENLIALFPGEKRNGLFGNLIALSLGLTPNFKSNFDLAEDAKLQLSKDTYDEDLDNLLAQIGDQYADLFLAAKNLSDAILLSGILTVKDGITKAPLSASMIKRYDEHHQDLTLLKKLVREQLPEKYKEIFFDESKNGYAGYIDGGASQEEFYKFIKPILEKMDGTEELLAKIDREDFLRKQRTFDNGSIPHQIHLGELKAILRRQEKFYPFLKENREKIEKILTFRIPYYVGPLARGNSRFAWMIRKSEETITPWNFEEVVDKEASAQAFIERMTNFDKNLPDEKVLPKHSLLYEYFTVYNELTKVKYVTEGMKKPEFLSSEQKEAIVDLLFKKNRKVTVKQLKEFYFSKIECFDSVEISGVEDRFNASLGTYHDLLKIIKDKEFLDNEENEDILEDIVLTLTLFEDKEMIEKRLKKYADLFDKKVLKQLKRRRYTGWGRLSRKLINGIRDKQSGKTILDFLKSDGFANRNFMQLIHDDSLTFKEEIKKAQVSGQGDSLHEVIANLAGSPAIKKGILQTVKIVDEIVKVMGRHAPENIVIEMARENQTTQKGQKNSRERMKRLEEGIKELGSQILKEHPVENTQLQNDKLYLYYLQNGKDMYTGEELDIDRLSDYDVDHIIPQSFIKDDSIDNKVLTSSEKARGKSDNVPSEEVVKKMKNYWRQLLNAKLISQRKFDNLTKAERGGLSELDKAGFIKRQLVETRQITKHVAQILDSRFNTKRDENDKLIRDVKIITLKSKLVSDFRKDFGFYKVREINDYHHAHDAYLNAVVGTALIKKYPKLESEFVYGDYKVYDSRKMIAKSEQEIGKATAKRFFYSNIMNFFKSEIKLADGEIIKRPLIETNEETGEIVWDKGKDFATVRKVLSMPQVNIVKKTEVQTGGFSKESILPKRDSDKLIARKKDWDTKKYGGFDSPTVAYSVLVVAKVEKGKSKKLKTVKELVGITIMERSSFEKDPIAFLEAKGYKDIQKDLIIKLPKYSLFELENGRKRLLASAGELQKGNELALPSKYVTFLYHASNYEKLKGKPEDEEKKREYVEQHNHEFDEILDQISEFSKRYILADKNLEKILSLYNKFRDKSIREQAENFINLFTLTALGAPAAFKFFDKTIDRKRYTSTKEILNATLIHQSITGLYETRIDLSKLGGD

SEQ ID NO: 185 - protein, 1368 aa, synthetic construct
MDKKYSIGLDIGTNSVGWAVITDEYKVPSKKFKVLGNTDRHSIKKNLIGALLFDSGETAEATRLKRTARRRYTRRKNRICYLQEIFSNEMAKVDPSFFERLEESFLVEEDKKYSRHPIFGNIVEEVAYHEKYPTIYHLRKKLVDSEEKADLRLIYLALAHMIKFRGHFLIEGDLNPDNSDVDKLFIQLVQTYNQLFEENPINASGVDAKAILSARLSKSRRLENLIAQLPGEKKNGLFGNLIALSLGLTPNFKSNFDLAEDAKLQLSKDTYDDDLDNLLAQIGDQYADLFLAAKNLSDAILLSDILRVDTKETKAPLSASMIKRYDDHHQDLTLLKELVRKELPEKYKEIFFDQNKAGYAGYIDGGATQEEFYKYIKPILESMSGTKELLEKLENRDLLRKQRTFDNGSIPHQIHLGELRAILERQEKFYPFLKENREKIEKILTFRIPYYVGPLARGNSRFAWMTRKSEETITPWNFEEVVDKGASAQSFIERMTNFDKNLPNEKVLPKHSLLYEYFTVYNELTKVKYVTEGMRKPAFLSGEQKKAIVDLLFKTNRKVTVKQLKEDYFKKIECFDSVEISGVEDRFNASLGTYHDLLKIIKDKDFLDNEENEDILEDIVLTLTLFEDREMIEERLKTYAHLFDDKVMKQLKRRRYTGWGRLSRKLINGIRDKQSGKTILDFLKSDGFANRNFMQLIHDDSLTFKEDIQKAQVSGQGDSLHEHIANLAGSPAIKKGILQTVKVVDELVKVMGRHKPENIVIEMARENQTTQKGQKNSRERMKRIEEGIKELGSQILKEHPVENTQLQNEKLYLYYLQNGRDMYVDQELDINRLSDYDVDHIVPQSFLKDDSIDNKVLTRSDKARGKSDNVPSEEVVKKMKNYWRQLLNAKLITQRKFDNLTKAERGGLSELDKAGFIKRQLVETRQITKHVAQILDSRMNTKYDENDKLIREVKVITLKSKLVSDFRKDFQFYKVREINNYHHAHDAYLNAVVGTALIKKYPKLESEFVYGDYKVYDVRKMIAKSEQEIGKATAKYFFYSNIMNFFKTEITLANGEIRKRPLIETNGETGEIVWDKGRDFATVRKVLSMPQVNIVKKTEVQTGGFSKESILPKRDSDKLIARKKDWDPKKYGGFDSPTVAYSVLVVAKKEVGKEKKLVEVKDLLGITIMERSKFEKDPLKFLEEKGYKDVKMDEIIKLPKYSLFELGNGRKRMLASAGELQKGNELALPSEYVNFLYLASNYEKLKGKEEEKKKKQEYVEKNKSYLDDIINQISEFSKRVIGADANLEKVLAAYKKHKNKPISEQAENIIHLFTLTRLGAPAAFKYFDETIDRKRYTSTKEVLDATLIHQSITGLYETRIDLSFLGGD

SEQ ID NO: 186 - protein, 1368 aa, synthetic construct
MDKKYSIGLDIGTNSVGWAVITDEYKVPSKKFKVLGNTDRHSIKKNLIGALLFDSGETAEATRLKRTARRRYTRRKNRICYLQEIFSNEMAKVDDSFFHRLEESFLVEEDKQGDRHPIFGNIVEEVAYHEKYPTIYHLRKELADSTEKADLRLVYLALAHIIKFRGHFLIEGDLNPENTDVQKLFKDFVEIYNQTFEESPLNEEKVDAKSILTEKLSKSRRLENLIAQFPNEKKNGLFGNLIALILGLQPNFKSNFQLAEDAKLQFSKDTYDEDLENLLGQIGDEYADLFVAAKNLYDAILLSGILTVSDATTKAPLSASMIKRYDEHHQDLTLLKTFVRENLPEKYKEIFFDESKNGYAGYIDGGASQEEFYKYIKKLLEKIDGSEYFLEKIDREDFLRKQRTFDNGSIPHQIHLQELHAILRRQEEFYPFLKENREKIEKILTFRIPYYVGPLARGNSRFAWMTRKSDETITPWNFDEIVDKEKSAEAFIERMTNNDKNLPDEKVLPKHSLLYEKFTVYNELTKVKYVTEGMGKPKFFDANQKQEIFDGLFKKYRKVTKKKLLDFLDKEFDEFRIVDISGVEKAFNASLGTYHDLKKIIKDKAFLDNEENEKILEDIILTLTLFEDREMIRQRLEKYADLFDKKQLKKLERRRYTGWGRLSAKLINGIRDKQTGKTILDYLIDDGRANRNFMQLIHDDSLSFKEEIAKAQVAGEGDSLHEHIANLAGSPAIKKGILQTVKVVDELVKVMGRHKPENIVIEMARENQTTQKGQKNSRERMKRIEEGIKELGSQILKEHPVENTQLQNEKLYLYYLQNGRDMYVDQELDINRLSDYDVDHIVPQSFLKDDSIDNKVLTRSDKARGKSDNVPSEEVVKKMKNYWRQLLNAKLITQRKFDNLTKAERGGLSELDKAGFIKRQLVETRQITKHVAQILDSRMNTKYDENDKLIREVKVITLKSKLVSDFRKDFQFYKVREINNYHHAHDAYLNAVVGTALIKKYPKLESEFVYGDYKVYDVRKMIAKSEQEIGKATAKYFFYSNIMNFFKTEITLANGEIRKRPLIETNGETGEIVWDKGRDFATVRKVLSMPQVNIVKKTEVQTGGFSKESILPKRDSDKLIARKKDWDTKKYGGFDSPTVAYSVLVVADIEKGKSKKLKTVKELIGITIMERSKFEKDPVAFLEQKGYQNIKEDKIIKLPKYSLFELENGRKRLLASAGELQKGNELALPNKYVTLLYHAKHYEKLKEQQEDIEGHREYVEKHRDEFDELLDQINEFSERYILADKNLSKIEELYAQNLEYSIEELANSFINLLTFTALGAPAAFKFFGNTIDRKRYTSTKEILNATLIHQSITGLYETRIDLSKLGGD

SEQ ID NO: 187 - protein, 1368 aa, synthetic construct
MDKKYSIGLDIGTNSVGWAVITDEYKVPSKKFKVLGNTDRHSIKKNLIGALLFDSGETAEATRLKRTARRRYTRRKNRICYLQEIFSNEMAKVDPSFFQRLEESFLVEEDKSGSRHPIFGNIVDEVAYHEKYPTIYHLRKKLVDSDEKADLRLIYLALAHMIKFRGHFLIEGDLNPDNSDVDKLFIQLVQTYNQLFEENPINASGVDAKAILSARLSKSRRLENLIAQLPGEKKNGLFGNLIALSLGLTPNFKSNFDLAEDAKLQLSKDTYDDDLDNLLAQIGDQYADLFLAAKNLSDAILLSDILRVDTSETKAPLSASMIKRYDEHHQDLTLLKELVRKYLPEKYKEIFFNQNNNGYAGYIDGGATQEEFYEYIKPILESMPGTKELLEKLEKRDLLRKQRTFDNGSIPHQIHLGELKAILERQEKFYPFLKENREKIEKILSFRIPYYVGPLARGNSRFAWMTRKSEETITPWNFEEVVDKGASAQSFIERMTNFDKNLPNEKVLPKHSLLYEYFTVYNELTKVKYVTEGMRKPAFLSGEQKKAIVDLLFKTNRKVTVKQLKEDYFKKIECFDSVEISGVEDRFNASLGTYHDLLKIIKDKDFLDNEENEDILEDIVLTLTLFEDREMIEERLKTYAHLFDDKVMKQLKRRRYTGWGRLSRKLINGIRDKQSGKTILDFLKSDGFANRNFMQLIHDDSLTFKEDIQKAQVSGQGDSLHEHIANLAGSPAIKKGILQTVKVVDELVKVMGRHKPENIVIEMARENQTTQKGQKNSRERMKRIEEGIKELGSQILKEHPVENTQLQNEKLYLYYLQNGRDMYVDQELDINRLSDYDVDHIVPQSFLKDDSIDNKVLTRSDKARGKSDNVPSEEVVKKMKNYWRQLLNAKLITQRKFDNLTKAERGGLSELDKAGFIKRQLVETRQITKHVAQILDSRMNTKYDENDKLIREVKVITLKSKLVSDFRKDFQFYKVREINNYHHAHDAYLNAVVGTALIKKYPKLESEFVYGDYKVYDVRKMIAKSEQEIGKATAKYFFYSNIMNFFKTEITLANGEIRKRPLIETNGETGEIVWDKGRDFATVRKVLSMPQVNIVKKTEVQTGGFSKESILPKRDSDKLIARKKDWDPKKYGGFDSPTVAYSVLVVAKKEVGKEKKLVEVKELLGITIMERSEFEKDPLGFLEKKGYKDVKKDKIIKLPKYSLFELGNGRKRMLASAGELQKGNELALPSEYVNFLYLASNYEKLKGDPEEIKKKQEYVEKNKHYLDEIIEQISEFSKRVIKADANLEKVLEAYKKHKDKPISEQAENIIHLFTLTALGAPAAFKYFDEVIDRKRYTSTKEVLDATLIHQSITGLYETRIDLKFLGGD

SEQ ID NO: 188 - protein, 1368 aa, synthetic construct
MKKPYSIGLDIGTNSVGWAVVTDDYKVPAKKMKVLGNTDKSHIKKNLLGALLFDSGNTAEDRRLKRTARRRYTRRRNRILYLQEIFSEEMGKVDDSFFHRLEDSFLVPEDKRGERHPIFGNLEEEVKYHENFPTIYHLRKYLADNPEKADLRLVYLALAHIIKFRGHFLIEGKLDTRNNDVQRLFQEFLAVYDNTFEESSLQEQNVQVEEILTDKISKSAKKDRVLKLFPNEKSNGRFAEFLKLIVGNQADFKKHFELEEKAPLQFSKDTYEEDLETLLAQIGDDYADLFLSAKKLYDSILLSGILTVTDVSTKAPLSASMIQRYNEHQMDLTQLKQFIRQKLPDKYNEVFSDVSKDGYAGYIDGKTNQEDFYKYLKKLLNKIEGSGYFLDKIEREDFLRKQRTFDNGSIPHQIHLQEMRAIIRRQAEFYPFLAENQDKIEKILTFRIPYYVGPLARGKSDFAWLSRKSAEKITPWNFDEIVDKESSAEAFINRMTNYDLYLPNQKVLPKHSLLYEKFTVYNELTKVKYKTEQMGKTAFFDANMKQEIFDGVFKVYRKVTKDKLMDFLEKEFDEFRIVDLTGLDKAFNASYGTYHDLRKILKDKDFLDNSKNEKILEDIVLTLTLFEDREMIRKRLENYSDLLTKEQVKKLERRHYTGWGRLSAKLIHGIRNKESRKTILDYLIDDGNSNRNFMQLINDDALSFKEEIAKAQVIGETDNLNQVVSDIAGSPAIKKGILQSLKIVDELVKIMGGHQPENIVVEMARENQFTNQGRRNSQQRLKGLTDSIKEFGSQILKEHPVENSQLQNDRLFLYYLQNGRDMYTGEELDIDYLSQYDIDHIIPQAFIKDDSIDNRVLVSSKEARGKSDDVPSKDVVRKMKSYWSKLLSAKLITQRKFDNLTKAERGGLTDDDKAGFIKRQLVETRQITKHVARILDERFNTETDENNKKIRQVKIVTLKSNLVSNFRKEFELYKVREINDYHHAHDAYLNAVVGKALLGKYPKLEPEFVYGDYPKFNSHKLFSKSKKEENKATAKKFFYSNIMNFFKKDVKLADGSIVERPQIEVNDETGEIIWDKDKHISNVKKVLSYPQVNIVKKVEEQTGGFSKESILPKGNSDKLIPRKTKWDTKKYGGFDSPIVAYSVLVIADIEKGKSKKLKTVKELVGITIMEKMTFEKDPVAFLERKGYRNIQEENIIKLPKYSLFELENGRKRLLASARELQKGNEIVLPNHLVTLLYHAKNIHKVDEKEEDIPKHLDYVDKHRDEFKELLDVVSNFSKKYTLAEGNLEKIKELYAQNNSADIKELASSFINLLTFTAIGAPATFKFFDKNIDRKRYTSTTEILNATLIHQSITGLYETRIDLSKLGGD

SEQ ID NO: 189 - protein, 1368 aa, synthetic construct
MKKKYSIGLDIGTNSVGWAVITDEYKVPSKKFKVLGNTDRHSIKKNLLGALLFDSGETAEATRLKRTARRRYTRRKNRIRYLQEIFAEEMSKVDDSFFHRLEESFLVEEDKKHERHPIFGNIVDEVAYHEKYPTIYHLRKHLADSKEKADLRLIYLALAHIIKFRGHFLIEGDLNSENSDVQKLFIQLVQTYNQLFEENPINEETVDAKAILSEKLSKSRRLENLIAQFPGEKKNGLFGNLIALSLGLTPNFKANFDLSEDAKLQFSKDTYDEDLENLLAQIGDQYADLFLAAKNLSDAILLSDILTVNDESTKAPLSASMIKRYDEHHQDLTLLKALVRQQLPEKYKEIFFDKSKNGYAGYIDGGASQEEFYKYIKPILEKMDGTEELLEKLNREDFLRKQRTFDNGSIPHQIHLGELHAILRRQEEFYPFLKENREKIEKILTFRIPYYVGPLARGNSRFAWMTRKSEETITPWNFEEVVDKEASAQAFIERMTNFDKNLPTEKVLPKHSLLYEYFTVYNELTKVKYVTEGMGKPEFLSGEQKKEIVDLLFKKNRKVTVKQLKEDYFKKIECLDSVEISGVEDRFNASLGTYHDLLKIIKDKEFLDNEENEDILEDIVLTLTLFEDREMIEKRLKKYADLFDDKVLKQLKRRRYTGWGRLSAKLINGIRDKQSGKTILDFLKDDGFANRNFMQLIHDDSLTFKEEIQKAQVEGQGDSLHEIIANLAGSPAIKKGILQTVKIVDELVKVMGRHKPENIVIEMARENQTTQKGQKNSRERLKRLEEVIKELGSQILKEHPVENTQLQNDKLYLYYLQNGKDMYTGEELDIDRLSDYDVDHIIPQSFIKDDSIDNRVLTSSEEARGKSDDVPSEEVVKKMKSYWRQLLNAKLISQRKFDNLTKAERGGLSELDKAGFIKRQLVETRQITKHVAQILDSRFNTKRDENNKLIRDVKIITLKSKLVSDFRKDFQFYKVREINDYHHAHDAYLNAVVGTALIKKYPKLESEFVYGDYKVYDSRKLIAKSEQEIGKATAKMFFYSNIMNFFKTEIKLADGEIFKRPLIETNEETGEIVWDKEKDFATVRKVLSMPQVNIVKKTEVQTGGFSKESILPKRDSDKLIARKKDWDPKKYGGFDSPTVAYSVLVVAKIEKGKTKKLKTVKELVGITIMERSSFEKDPVAFLEAKGYQEIQEDLIIKLPKYSLFELENGRKRLLASAGELQKGNELALPQKYVTLLYLASHYEKLKGKPEDEKQHKLYVEQHKSYFDEILDQISEFSERYILADKNLEKILELYKKNEDYSISEQAENIINLFTLTALGAPAAFKFFDTTIDRKRYTSTKEILDSTLIHQSITGLYETRIDLSQLGGD

SEQ ID NO: 190 - protein, 1368 aa, synthetic construct
MKKPYSIGLDIGTNSVGWAVVTDDYKVPAKKMKVLGNTDKSHIKKNLLGALLFDSGNTAEDRRLKRTARRRYTRRRNRILYLQEIFSEEMGKVDDSFFHRLEDSFLVPEDKRGERHPIFGNLEEEVKYHENFPTIYHLRKHLADSPEKADLRLVYLALAHIIKFRGHFLIEGKFDTRNNDVQRLFQEFLAVYDNTFENSSLSEQNVQVEEILTDKISKSAKKDRVLKLFPNEKSNGRFAEFLKLIVGNQADFKKHFELEEKAPLQFSKDTYEEDLEVLLAQIGDEYADLFLSAKKLYDSILLSGILTVTDVSTKAPLSASMIKRYNEHQMDLTQLKQFIRQKLPDKYNEVFSDVSKDGYAGYIDGKTNQEDFYKYLKKLLNKIEGSEYFLDKIEREDFLRKQRTFDNGSIPHQIHLQEMRAIIRRQAEFYPFLAENQDKIEKILTFRIPYYVGPLARGKSDFAWLSRKSDEKITPWNFDEIVDKESSAEAFINRMTNYDLYLPNEKVLPKHSLLYEKFTVYNELTKVKYKTEQMGKTAFFDANMKQEIFDGVFKVYRKVTKDKLMDFLEKEFDEFRIVDLTGLDKAFNASYGTYHDLLKILKDKDFLDNSKNEKILEDIVLTLTLFEDREMIRKRLENYSDLLTKEQLKKLERRHYTGWGRLSAKLINGIRNKESRKTILDYLIDDGNSNRNFMQLINDDALSFKEEIAKAQVIGETDNLNQVVSDIAGSPAIKKGILQSLKIVDELVKIMGGHQPENIVVEMARENQFTNQGRRNSQQRLKGLTDSIKEFGSQILKEHPVENSQLQNDRLFLYYLQNGRDMYTGEELDIDYLSQYDIDHIIPQAFIKDDSIDNRVLTSSKEARGKSDDVPSKDVVRKMKSFWSKLLSAKLITQRKFDNLTKAERGGLTDDDKAGFIKRQLVETRQITKHVARILDERFNTETDENNKKIRQVKIVTLKSNLVSNFRKEFELYKVREINDYHHAHDAYLNAVVGKALLGVYPQLEPEFVYGDYPKFNSHKLVKESTQEENKATAKKFFYSNIMNFFKKDDKLADGSIVERPQIERNDENGEIIWKKDKHISNIKKVLSYPQVNIVKKVEEQTGGFSKESILPKGNSDKLIPRKTKWDTKKYGGFDSPIVAYSVLVIADIEKGKSKKLKTVKELVGITIMEKMTFEKDPVAFLERKGYQNIQEENIIKLPKYSLFELENGRKRLLASARELQKGNEIVLPNHLGTLLYHAKNIHKVDEKNEEIPKHLDYVEKHRDEFKELLDVVSNFSKKYTLAEGNLEKIKELYAQNNQADIKELASSFINLLTFTAIGAPATFKFFDKNIDRKRYTSTTEILNATLIHQSITGLYETRIDLSKLGGD

SEQ ID NO: 191 - protein, 1368 aa, synthetic construct
MDKSYSIGLDIGTNSVGWAVITDEYKVPSKKFKVLGNTDRHSIKKNLIGALLFDSGETAEATRLKRTARRRYTRRKNRIRYLQEIFAEEMSKVDDSFFHRLEESFLVEEDKRGERHPIFGNIVDEVAYHEKYPTIYHLRKKLADSTEKADLRLIYLALAHIIKFRGHFLIEGDLNSENSDVQKLFIQFVQTYDQTFEESHLSEETVDAKAILTEKLSKSRRLENLIKQFPGEKKNGLFGNLIALSLGLTPNFKSNFGLAEDAKLQFSKDTYDEDLENLLGQIGDQYADLFVAAKNLYDAILLSGILTVNTEITKAPLSASMIKRYDEHHQDLTLLKKFIREQLPEKYKEIFFDQSKNGYAGYIDGGASQEEFYKYIKPILSKMDGSEYFLEKIEREDFLRKQRTFDNGSIPHQIHLGELHAILRRQEKFYPFLKENQEKIEKILTFRIPYYVGPLARGNSRFAWATRKSDETITPWNFEEVVDKEASAQAFIERMTNNDKNLPEEKVLPKHSLLYEKFTVYNELTKVKYITEGMRKPAFFSANQKEEIVDLLFKKNRKVTVKKLKEYLFKEFECFRSVEISGVEDRFNASLGTYHDLLKIIKDKDFLDNEENEDILEDIVLTLTLFEDREMIEQRLSKYADLFDKKVLKKLKRRRYTGWGRLSAKLINGIRDKQSGKTILDFLIDDGFANRNFMQLIHDDSLTFKEEIQKAQVIGQTDSLHEVIANLAGSPAIKKGILQSIKIVDELVKVMGRHNPENIVIEMARENQTTQKGQRNSRERLKRLEEGIKELGSKILKEHPVDNTQLQNDKLYLYYLQNGKDMYTGEELDIDRLSDYDVDHIIPQSFIKDDSIDNRVLTSSAKARGKSDNVPSEEVVKKMKSFWRQLLNAKLISQRKFDNLTKAERGGLTELDKAGFIKRQLVETRQITKHVAQILDSRFNTKYDENDKLIRDVKIITLKSKLVSQFRKDFQFYKVREINDYHHAHDAYLNAVVGTALIKKYPKLESEFVYGDYKVYNSRKMIAKSEQEIGKATAKYFFYSNIMNFFKTDVTLANGEIRKRPLIETNEETGEIVWDKEKDFATVRKVLSMPQVNIVKKTEVQTGGFSKESILPKRNSDKLIARKKDWDTKKYGGFDSPTVAYSVLVVADVEKGKAKKLKTVKELVGITIMERSSFEKNPVAFLEDKGYQNIQKDLIIKLPKYSLFELENGRKRLLASAGELQKGNELALPQKYVTLLYHAKHYEKLKESPEDNEKKKEYVEQHRQEFDEILDQIGEFSERYILADKNLEKIKELYAENEDASIEELASSFINLLTFTALGAPAAFKFFDKTIDRKRYTSTTEILNATLIHQSITGLYETRIDLSQLGGD

SEQ ID NO: 192 - protein, 1368 aa, synthetic construct
MKKKYSIGLDIGTNSVGWAVVTDDYKVPSKKMKVLGNTDRQSIKKNLLGALLFDSGETAEATRLKRTARRRYTRRKNRILYLQEIFAEEMNKVDDSFFHRLEESFLVEEDKRGERHPIFGNIVEEVAYHEKFPTIYHLRKHLADSTEKADLRLVYLALAHIIKFRGHFLIEGDLNTENTDVQKLFLQFVETYDNLFEESPLGEETVDAESILTAKLSKSRRLENLIKQFPNEKKNGLFGNLIALSLGLQPNFKSNFGLAEDAKLQFSKDTYDEDLENLLGQIGDEYADLFAAAKNLYDAILLSGILTVNDESTKAPLSASMIKRYEEHHEDLTLLKYFIRNNLPEKYKEIFFDESKNGYAGYIDGGVKQEEFYKYLKNLLSKLDGSEYFLDKIEREDFLRKQRTFDNGSIPHQIHLQELHAILRRQAEYYPFLKENQEKIEKILTFRIPYYVGPLARGNSRFAWMSRKSDETITPWNFDEVVDKEASAEAFIERMTNNDLYLPNEKVLPKHSLLYEKFTVYNELTKVKYVTEGMGKAQFFSAEQKKEIFDGLFKKNRKVTKKKLKNFLDKEFDEFRIVDISGVEDAFNASLGTYHDLLKIIKDKEFLDNEENEDILEDIVLTLTLFEDREMIRQRLSKYADLFDKKVLKKLERRHYTGWGRLSAKLINGIRDKQTGKTILDYLIDDGFANRNFMQLIHDDSLSFKEEIEKAQVIGDTDSLHEVVANLAGSPAIKKGILQSLKIVDELVKVMGRHNPENIVIEMARENQTTAKGQRNSRERLKRLEEAIKKLGSNILKEHPVENQQLQNDRLYLYYLQNGKDMYTGEELDIDRLSQYDVDHIIPQSFIKDDSIDNRVLTSSKKARGKSDNVPSEEVVRKMKSYWMQLLDAKLISQRKFDNLTKAERGGLTEDDKAGFIKRQLVETRQITKHVAQILDSRFNTERDENDKLIRKVKIITLKSKLVSDFRKDFGLYKVREINDYHHAHDAYLNAVVGKALIKKYPKLEPEFVYGDYPKYNVRKMVRKSDQEIGKATAKRFFYSNIMNFFKSEIKLADGRIVERPQIEANEETGEIAWDKEKDFATVRKVLSMPQVNIVKKTEVQTGGFSKESILPKRDSDKLIARKKKWDPKKYGGFDSPTVAYSVLVVADIEKGKAKKLKTVKELVGITIMERSAFEKNPVAFLENKGYQNIQKDLIIKLPKYSLFELENGRKRLLASAGELQKGNELALPQKLVTLLYHAKHYEKLKEKEEDNEKHMEYVEQHRDEFKEIFDQISEFSERYILADKNLEKISSLYAKNEDASIEELASSFINLLTFTALGAPAAFKFFGTTIDRKRYTSTTEILNATLIHQSITGLYETRIDLSKLGGD

SEQ ID NO: 193 - protein, 1368 aa, synthetic construct
MDKKYSIGLDIGTNSVGWAVVTDEYKVPSKKFKVLGNTDRKSIKKNLLGALLFDSGETAEATRLKRTARRRYTRRKNRICYLQEIFSNEMAKVDDNFFQRLEESFLVEEDKKNDRHPIFGNIVEEVAYHEKYPTIYHLRKKLADSTEKADLRLVYLALAHIIKFRGHFLIEGDLNSENTDVDKLFIQLVQTYNQLFEENPINASGVDAKAILSARLSKSRRLENLIAQLPGEKKNGLFGNLIALSLGLTPNFKSNFDLAEDAKLQLSKDTYDDDLDNLLAQIGDQYADLFLAAKNLSDAILLSDILRVNDESTKAPLSASMVKRYDEHHQDLTLLKQFVRKQLPEKYKEIFFDQSKNGYAGYIDGGASQEEFYKYLKKILEKIDGSEEFLDKIEREDFLRKQRTFDNGSIPHQIHLQELHAIIRRQEKYYPFLKENKEKIEKILTFRIPYYVGPLARGNSRFAWLSRKSDETITPWNFDEVVDKEASAEAFIERMTNFDKNLPDEKVLPKHSLLYEKFTVYNELTKVKYVTEGMRKPEFFSAEQKQEIVDLLFKKNRKVTKKQLKEYLVKEFDEFDIVEISGVEDRFNASLGTYHDLLKIIKDKDFLDNEENEKILEDIILTLTLFEDREMIKKRLEKYADLFDKKQLKKLKRRRYTGWGRLSAKLINGIRDKQTGKTILDYLIDDGFANRNFMQLIHDDSLTFKEEIEKAQVIGKSESLHETIANLAGSPAIKKGILQSLKIVDELVKVMGRHAPENIVVEMARENQTTQKGQKNSRERMKRIEEGIKELGSQILKEHPVENTQLQNEKLYLYYLQNGRDMYVDQELDINRLSDYDVDHIVPQSFLKDDSIDNKVLTRSDKARGKSDNVPSEEVVKKMKNYWRQLLNAKLITQRKFDNLTKAERGGLSELDKAGFIKRQLVETRQITKHVAQILDSRFNTEYDENGKLIRDVKIITLKSKLVSDFRKDFELYKVREINNYHHAHDAYLNAVVGTALIKKYPKLESEFVYGDYKVYDVRKMIAKSEKEIGKATAKYFFYSNIMNFFKSEVTLANGTIRKRPLIEVNEETGEIVWDKEKDIATVKKVLSMPQVNIVKKTEVQTGGFSKESILPKRDSDKLIARKKDWDTKKYGGFDSPTVAYSVLVVADVEKGKAKKLKTVKELVGITIMERSAFEKNPIAFLEDKGYKNIQKDNIIKLPKYSLFELENGRKRLLASAGELQKGNELALPQKYVTLLYHAKHYEKLKGSPEDNEKHQYYVEEHKDEFDEILDQIIEFSKRYILADANLEKIKKLYEKNFDASIEELAENFIHLLTFTALGAPAAFKFFGTTIDRKRYTSTKEILNATLIHQSITGLYETRIDLSKLGGD

SEQ ID NO: 194 - protein, 1368 aa, synthetic construct
MDKKYSIGLDIGTNSVGWAVITDEYKVPSKKFKVLGNTDRHSIKKNLIGALLFDSGETAEATRLKRTARRRYTRRKNRICYLQEIFSNEMAKVDENFFQRLDDSFLYPEDKRNDKYPIFGTLAEEKDYHKQFPTIYHLRKELADNDEKADLRLVYLALAHIIKYRGHFLIEGNLDSENTDIQATFKDFIEVFDRTVENSSLSEETVDVESILTEKISKSRRLEKLLKKFPTEKKNTIFAEFLKLIVGNTADFKKNFGLEEDAKLQFSKDTYEEDLEELLGKIGDEYADLFIAAKKLYDAILLSGILTGKDNSTKAPLSASMVDRYEEHQKDLKKLKEFIKKNFPDEYNEIFRDKTKNGYAGYIEGKTKQDDFYKYLKKLLSKIEGSDYFLDKIEREDFLRKQRTFDNGSIPHQVHLQEMKAIIRRQGKYYPFLKENQDKIEKILTFRIPYYVGPLARKKSRFAWAERKTDEKITPWNFDDVIDKEKSAEKFITRMTNNDLYLPEEKVLPKHSLLYEKFTVYNELTKVKYINEQGKEEKFFDANMKQEIFENVFKKYRKVTKKKLLDYLVKEFDELRIVDLTGLDKRFNSSLGTYHDLKKILFDKSFLDDDANQEMIEDIIQTLTLFEDKEMIKKRLEKYSDILTKEQLKKLEKRHYTGWGRLSAKLINGIRNKETGKTILDYLIDDGYTNRNFMQLIHDDTLSFKDIIAEAQAIKDVDSLHEHIANLAGSPAIKKGILQTVKVVDELVKVMGRHKPENIVIEMARENQTTQKGQRRSQQRLKKLQESLKELKKDILKEYPTDNQKLQSDRLFLYYIQNGKDMYTGEPLDIDNLSQYDIDHIIPQAFIKDDSIDNRVLVSSAEARGKSDDVPSIDIVNKMKSFWKRLLEAGLISQRKYDNLTKAERGGLSELDKAGFIKRQLVETRQITKHVAQILDSRMNTKYDENDKLIREVKVITLKSKLVSDFRKDFQFYKVREINNYHHAHDAYLNAVVGTALIKKYPKLESEFVYGDYKVYDVRKMIAKSEQEIGKATAKYFFYSNIMNFFKTEITLANGEIRKRPLIETNGETGEIVWDKGRDFATVRKVLSMPQVNIVKKTEVQTGGFSKESILPKRNSDKLIARKKDWDPKKYGGFDSPTVAYSVLVVAKVEKGKSKKLKSVKELLGITIMERSSFEKNPIDFLEAKGYKEVKKDLIIKLPKYSLFELENGRKRMLASAGELQKGNELALPSKYVNFLYLASHYEKLKGSPEDNEQKQLFVEQHKHYLDEIIEQISEFSKRVILADANLDKVLSAYNKHRDKPIREQAENIIHLFTLTNLGAPAAFKYFDTTIDRKRYTSTKEVLDATLIHQSITGLYETRIDLSQLGGD

SEQ ID NO: 195 - protein, 1368 aa, synthetic construct
MDKKYSIGLDIGTNSVGWAVITDEYKVPSKKFKVLGNTDRQSIKKNLLGALLFDSGETAEATRLKRTARRRYTRRKNRIRYLQEIFAEEMSKVDDSFFHRLEESFLVEEDKRKERHPIFGNIVEEVAYHEKYPTIYHLRKKLADSTEKADLRLIYLALAHIIKFRGHFLIEGDLNSENSDVQKLFIQLVQTYNQLFEENPISEEGVDAKAILSAKLSKSRRLENLIALFPGEKKNGLFGNLIALSLGLTPNFKSNFDLSEDAKLQLSKDTYDEDLDNLLAQIGDQYADLFLAAKNLSDAILLSGILTVNDEITKAPLSASMIKRYDEHHQDLTLLKALVRQQLPEKYKEIFFDESKNGYAGYIDGGASQEDFYKFIKPILEKLDGTEELLAKIEREDLLRKQRTFDNGSIPHQIHLNELKAILRRQEEFYPFLKENREKIEKILTFRIPYYVGPLARGNSRFAWMTRKSEETITPWNFEEVVDKGASAQAFIERMTNFDKNLPEEKVLPKHSLLYEYFTVYNELTKVKYVTEGMRKPEFLSGEQKEAIVDLLFKKNRKVTVKQLKEDYFKKIECFDSVEISGVEDRFNASLGTYHDLLKIIKDKDFLDNEENEDILEDIVLTLTLFEDREMIEERLSKYANLFDKKVLKQLKRRRYTGWGRLSRKLINGIRDKQSGKTILDFLKDDGFANRNFMQLIHDDSLTFKEEIQKAQVVGQGDSLHEQIANLAGSPAIKKGILQSLKIVDELVKVMGRHKPENIVIEMARENQTTQKGQKNSRERMKRIEEGIKELGSQILKEHPVENTQLQNEKLYLYYLQNGRDMYVDQELDINRLSDYDVDHIVPQSFLKDDSIDNKVLTRSDKARGKSDNVPSEEVVKKMKNYWRQLLNAKLITQRKFDNLTKAERGGLSELDKAGFIKRQLVETRQITKHVAQILDSRFNTERDENDKLIRRVKIITLKSKLVSDFRKDFQLYKVREINNYHHAHDAYLNAVVGTALIKKYPKLESEFVYGDYKVYDVRKMIAKSEQEIGKATAKYFFYSNIMNFFKTEITLANGTIRKRPLIETNEETGEIVWDKGKDFATVRKVLSMPQVNIVKKTEVQTGGFSKESILPKRNSDKLIARKKDWDTKKYGGFDSPTVAYSVLVVAKVEKGKTKKLKTVKELVGITIMERSSFEKDPVAFLEDKGYKDIQEDLIIKLPKYSLFELENGRKRLLASAGELQKGNELALPQKYVTLLYHAKRYEKLKGKPEDREQKLEYVEKHRHEFKEIFDQISEFAERYILADANLEKVLELYSKFEDAPIEELAENFIHLFTFTSLGAPAAFKFFDTTIDRKRYTSTKEILNATLIHQSITGLYETRIDLSKLGGD

SEQ ID NO: 196 - protein, 1368 aa, synthetic construct
MDKPYSIGLDIGTNSVGWAVITDEYKVPSKKFKVLGNTDRHSIKKNLLGALLFDSGETAEATRLKRTARRRYTRRKNRILYLQEIFSEEMSKVDDSFFHRLEESFLVEEDKRGERHPIFGNIVDEVAYHEKYPTIYHLRKELADSTEKADLRLIYLALAHMIKFRGHFLIEGQLNPENTDVQKLFQAFVEVYNRTFEESHLQEETVDVEAILTEKVSKSRRLENLIKQFPGEKKNGLFGNLIALSLGLTPNFKSNFDLSEDAKLQFSKDTYDEDLENLLGQIGDEYADLFLAAKNLSDAILLSGILTVNTEITKAPLSASMIKRYDEHHQDLTLLKKFVRQQLPEKYKEIFFDKSKNGYAGYIDGGASQEDFYKYLKPILSKLDGSEYFLDKIEREDFLRKQRTFDNGSIPHQIHLQELHAILRRQEVYYPFLKENQEKIEKILTFRIPYYVGPLARGNSRFAWMTRKSDETITPWNFEEVVDKEKSAEAFIERMTNNDKNLPEEKVLPKHSLLYEKFTVYNELTKVKYVTEGMRKPAFLDSNQKQEIFDLLFKKNRKVTVKKLKEFLFKKFEEFDIVEISGVEKRFNASLGTYHDLLKIIKDKDFLDNPENEEILEDIVLTLTLFEDREMIEQRLAKYADLFDKKVLKKLKRRRYTGWGRLSAKLINGIRDKQSGKTILDYLIDDGFANRNFMQLIHDDSLSFKEEIKKAQVIGKTDSLHEVIAELAGSPAIKKGILQSIKIVDELVKVMGRYAPENIVIEMARENQTTQKGQKNSRERLKRLEESIKKLGSNILKEHPVDNTQLQNDKLYLYYLQNGKDMYTGEELDINRLSDYDVDHIIPQSFIKDDSIDNRVLVSSKKARGKSDNVPSEEVVKKMKSFWYQLLKAKLISQRKFDNLTKAERGGLTELDKAGFIKRQLVETRQITKHVAQILDSRMNTKYDENDKLIRKVKIITLKSKLVSDFRKEFGFYKVREINDYHHAHDAYLNAVVGTALIKKYPKLESEFVYGDYKVYNSRKMIAKSEQEIGKATAKYFFYSNIMNFFKTDITLANGEIRKRPLIETNKETGEIVWDKEKDFATVKKVLSMPQVNIVKKTEVQTGGFSKESILPKRNSDKLIARKKDWDTKKYGGFDSPTVAYSVLVVADIEKGKAKKLKTVKELVGITIMERSAFEKNPIVFLENKGYKNIQKDLIIKLPKYSLFELENGRKRLLASAGELQKGNELALPNKYVTLLYLAKHYEKLKGSPEDNEKHLEYVEQHLSEFDEILNQISEFAKRYILADANLEKIQELYTQNEDASIEELAESFINLLTFTALGAPAAFKFFGKTIDRKRYTSTKEILNSTLIHQSITGLYETRIDLSQLGGD

SEQ ID NO: 197 - protein, 1368 aa, synthetic construct
MDKKYSIGLDIGTNSVGWAVITDEYKVPSKKFKVLGNTDRHSIKKNLLGALLFDSGETAEATRLKRTARRRYTRRKNRILYLQEIFAEEMNKVDDSFFHRLEESFLVEEDKRGERHPIFGNIVEEVAYHEKYPTIYHLRKHLADSTEKADLRLVYLALAHIIKFRGHFLIEGDLNAENTDVQKLFIDFVETYDRTFEESHLSEITVDASEILTDKISKSRKLENLIKLFPNEKKNGLFGNLIALILGNQPNFKTNFELSEDAKLQFSKDTYEEDLENLLGQIGDEYADLFVAAKNLYDAILLSGILTVNTEITKAPLSASMIKRYDEHHQDLTLLKAFIRKNLPEKYKEIFFDESKNGYAGYIDGGASQEEFYKYIKPLLSKIEGSEYFLDKIEREDFLRKQRTFDNGSIPHQIHLQELHAILRRQEEYYPFLKENQEKIEKILTFRIPYYVGPLARGNSRFAWASRKSDETITPWNFDEVVDKEKSAEAFIERMTNNDKNLPEEKVLPKHSLLYEKFTVYNELTKVKYVTEGMRKPAFFDANLKQEIFDLLFKENRKVTKKKLLDFLDKEFDEFRIVDISGVEKSFNASLGTYHDLLKIIKDKEFLDNPENEEILEDIVLTLTLFEDREMIKQRLSKYADLFDKKQLKKLKRRRYTGWGRLSAKLINGIRDKQSGKTILDYLIDDGFANRNFMQLIHDDSLSFKEEIAKAQVIGESDSLHQVIADLAGSPAIKKGILQSIKIVDELVKVMGRYNPENIVIEMARENQTTQKGQRNSRERLKRLEESLKELGSKILKEHPVDNTQLQNDKLYLYYLQNGRDMYTGEELDIDRLSDYDVDHIIPQSFIKDDSIDNRVLTSSAKARGKSDDVPSEEVVKKMKSFWKKLLDAKLISQRKFDNLTKAERGGLTELDKAGFIKRQLVETRQITKHVAQILDSRFNTKYDENDKLIRDVKIITLKSKLVSQFRKEFELYKVREINDYHHAHDAYLNAVVGKALIKKYPKLESEFVYGDYPVYNSYKMIAKSEQEIGKATAKYFFYSNIMNFFKTDITLANGEIRKRPLIETNEETGEIAWDKEKHIATVKKVLSMPQVNIVKKTEVQTGGFSKESILPKRNSDKLIARKKDWDTKKYGGFDSPTVAYSVLVIADIEKGKAKKLKTVKELVGITIMERSSFEKNPIAFLEDKGYQNIQKDNIIKLPKYSLFELENGRKRLLASAGELQKGNELALPNHYVTLLYHAKHYEKLKESPEDNPKHLNYVEEHRSEFDELLDQISEFSKRYILADKNLEKIKELYAKNKDADIEELASSFINLLTFTALGAPAAFKFFGKDIDRKRYTSTTEILNATLIHQSITGLYETRIDLSQLGGD

SEQ ID NO: 198 - protein, 1368 aa, synthetic construct
MDKKYSIGLDIGTNSVGWAVITDEYKVPSKKFKVLGNTDRHSIKKNLIGALLFDSGETAEATRLKRTARRRYTRRKNRICYLQEIFSNEMAKVDDSFFHRLEESFLVEEDKKHERHPIFGNIVDEVAYHEKYPTIYHLRKKLVDSTDKADLRLIYLALAHMIKFRGHFLIEGDLNPDNSDVDKLFIQLVQTYNQLFEENPINASGVDAKAILSARLSKSRRLENLIAQLPGEKKNGLFGNLIALSLGLTPNFKSNFDLAEDAKLQLSKDTYDDDLDNLLAQIGDQYADLFLAAKNLSDAILLSDILRVNTEITKAPLSASMIKRYDEHHQDLTLLKELVRKQLPEKYKEIFFDQSKNGYAGYIDGGASQEDFYKYIKKILEKMDGTEELLAKLEREDLLRKQRTFDNGSIPHQIHLGELHAILRRQEEYYPFLKDNREKIEKILTFRIPYYVGPLARGNSRFAWMKRKSEETITPWNFDEVVDKGASAQAFIERMTNFDKNLPNEKVLPKHSLLYEYFTVYNELTKVKYVTEGMRKPEFLDGEQKKEIVDNLFKKNRKVTVKQLKEYYFKKEDCFDSVEISGVEDRFNASLGTYHDLLKIIKDKAFLDNEENEEILEDIVLTLTLFEDREMIKERLEKYADLFDDKVMKQLKRRRYTGWGRLSRKLINGIRDKQSGKTILDFLIDDGFTNRNFMQLIHDDSLTFKEEIEKAQVSGQGDSLHEHIANLAGSPAIKKGILQTVKVVDELVKVMGRHKPENIVIEMARENQTTQKGQKNSRERMKRIEEGIKELGSQILKEHPVENTQLQNEKLYLYYLQNGRDMYVDQELDINRLSDYDVDHIVPQSFLKDDSIDNKVLTRSDKARGKSDNVPSEEVVKKMKNYWRQLLNAKLITQRKFDNLTKAERGGLSELDKAGFIKRQLVETRQITKHVAQILDSRMNTKYDENDKLIREVKVITLKSKLVSDFRKDFQFYKVREINNYHHAHDAYLNAVVGTALIKKYPKLESEFVYGDYKVYDVRKMIAKSEQEIGKATAKYFFYSNIMNFFKTEITLANGEIRKRPLIETNGETGEIVWDKGRDFATVRKVLSMPQVNIVKKTEVQTGGFSKESILPKRDSDKLIARKKDWDPKKYGGFDSPTVAYSVLVVAKIEKGKTKKLKTVKELLGITIMERSAFEKNPIAFLENKGYQNVKKDLIIKLPKYSLFELENGRKRMLASAGELQKGNELALPSKYVNFLYLASNYEKLKGSPEDNKRKQLFVEQHKDYLDEIIDQISEFSKRVILADANLEKVKKAYEKHKNKSIEEQAENIIHLFTLTALGAPAAFKYFDKDIDRKRYTSTKEVLNATLIHQSITGLYETRIDLSQLGGD

SEQ ID NO: 199 - protein, 1368 aa, synthetic construct
MDKKYSIGLDIGTNSVGWAVVTDEYKVPSKKFKVLGNTDRKSIKKNLIGALLFDSGETAEATRLKRTARRRYTRRKNRIRYLQEIFAEEMAKVDDSFFHRLEESFLVEEDKKNERHPIFGNIVDEVAYHEKYPTIYHLRKHLADSTEKADLRLIYLALAHIIKFRGHFLIEGDLNSENSDVQKLFEQLVQTYNQLFEESPLDEEEVDAEAILTEKLSKSRRLENLIALFPGEKKNGLFGNLIALSLGLTPNFKSNFDLSEDAKLQFSKDTYDEDLEELLGQIGDEYADLFVAAKNLYDAILLSGILTVNDESTKAPLSASMVKRYDEHHQDLTLLKQFIRKQLPEKYKEIFFDQSKNGYAGYIDGGASQEEFYKYLKKILEKIDGSEEFLDKIEREDFLRKQRTFDNGSIPHQIHLQELHAILRRQEKYYPFLKENQEKIEKILTFRIPYYVGPLARGNSRFAWMSRKSDETITPWNFEEVVDKEKSAEKFIERMTNFDKNLPNEKVLPKHSLLYEKFTVYNELTKVKYVTEGMKKPEFFDANQKQEIVDLLFKKNRKVTKKQLKEYLFKEFDEFDIVEISGVEDRFNASLGTYHDLLKIIDDKDFLDNEENEDILEDIILTLTLFEDREMIKKRLKKYADLFDKKQLKKLKRRRYTGWGRLSAKLINGIRDKQTGKTILDYLIDDGFANRNFMQLIHDDSLTFKEEIEKAQVIGDGESLHEVIANLAGSPAIKKGILQSLKIVDELVKVMGRHEPENIVIEMARENQTTQKGQKNSRERMKRLEEAIKELGSKILKEHPVENTQLQNDKLYLYYLQNGKDMYTGEELDIDRLSDYDVDHIVPQSFLKDDSIDNKVLVSSAKARGKSDDVPSEEIVKKMKSYWKKLLDAKLITQRKFDNLTKAERGGLTELDKAGFIKRQLVETRQITKHVAQILDSRFNTKYDENDKLIRDVKIITLKSKLVSQFRKDFGLYKVREINNYHHAHDAYLNAVVGTALIKKYPKLESEFVYGDYKVYDVRKMIAKSEKEIGKATAKYFFYSNIMNFFKTEVKLANGEIRKRPLIEVNEETGEIVWDKEKDFATVRKVLSMPQVNIVKKTEVQTGGFSKESILPKRDSDKLIARKKDWDTKKYGGFDSPTVAYSVLVVAKIEKGKAKKLKTVKELVGITIMERSAFEKNPVAFLEAKGYQEVQKDLIIKLPKYSLFELENGRKRLLASAGELQKGNELALPQKYVTLLYHAKHYEKLKGSPEDNEEKLLYVEQHKEYFDEIIEQISEFAKRYILADANLEKIKELYEKNRDADIEELAESFINLLTFTALGAPAAFKFFDTTIDRKRYTSTKEILNATLIHQSITGLYETRIDLSKLGGD

SEQ ID NO: 200 - protein, 1368 aa, synthetic construct
MKKPYSIGLDIGTNSVGWAVVTDDYKVPAKKMKVLGNTDKSHIKKNLLGALLFDSGNTAEGRRLKRTARRRYTRRRNRILYLQEIFSEEMNKVDESFFHRLDDSFLVPEDKRGERHPIFGDLAEETKYHKEFPTIYHLRKHLADSPEKADLRLVYLALAHIIKYRGHFLIEGDLDTRNNDVQQLFQEFLAIYDNTFERSSLQEQNAQAEEILTDKISKSAKKERVLKLFPNEKSNGFFAEFLKLIVGNQADFKKNFELEEKAPLQFSKDSYEEDLETLLGQIGDEYADLFVAAKKLYDSILLSGILTVTDVSTKAPLSASMIQRYEEHNMDLAKLKDFIRKNLSHKYKEVFNDESKDGYAGYIDGKTTQEAFYKYLKKLLSKTEGSGYFLDKIEREDFLRKQRTFDNGSIPHQIHLQEMRAIIRRQAEFYPFLAENQEKIEQILTFRIPYYVGPLARGESDFAWASRKSDEKITPWNFDDIIDKESSAEAFINRMTNYDLYLPEEKVLPKHSLLYEKFTVYNELTKVKYITEQMGKTQFFDANLKQEIFDGVFKVERKVTKKKLMDFLHHEFDEFRIVDLTGIDKAFNASLGTYHDLLKILNDKEFLDDSENEAILEDIVLTLTLFEDREMIKQRLSKYSDLFTKEQLKKLERRHYTGWGRLSAKLINGIRDKHTRKTILDYLIDDGRSNRNFMQLINDDALSFKEEIAKAQVIGETDNLKQVVQDLAGSPAIKKGILQSLKIVDELVKIMGGYNPENIVVEMARENQFTNRGRRNSQQRLKGLTDSIKELGSKILKEHPVDNSQLQNDRLFLYYLQNGKDMYTGEALDIDYLSQYDIDHIIPQAFIKDDSLDNRVLVSSAKARGKSDDVPSKEVVQKMKSFWSKLLDSKLISQRKFDNLTKAERGGLTDDDKAGFIKRQLVETRQITKHVARILDERFNTETDENNKKIRSVKIVTLKSNLVSNFRKEFEFYKVREINDYHHAHDAYLNAVVAKALLKKYPKLEPEFVYGEYPKYNSYRIVVENVKERKSATAKMFFYSNIMNFFKKTIKLADGTVVERPMIEVNEETGEIVWDKTKHISTVKKVLSYPQVNIVKKVEEQTGGFSKESILPKGDSDKLIPRKTKWDTKKYGGFDSPIVAYSVLVIADIEKGKAKKLKTVKELVGITIMERATFEKDPVAFLERKGYQNIQKENIIKLPKYSLFELENGRRRLLASAKELQKGNEMVLPNHLVTLLYHAKHIHKVDEKSEDAPKHLQYVDKHRSEFKELLDVVSNFSKKYILAEKNLEKIDELFDQNNGASVEELASSFINLLTFTAIGAPATFKFFGKNIDRKRYTSTTEILNATLIHQSITGLYETRIDLSKLGED

SEQ ID NO: 201 - protein, 1368 aa, synthetic construct
MDKKYSIGLDIGTNSVGWAVITDEYKVPSKKFKVLGNTDRHSIKKNLIGALLFDSGETAEATRLKRTARRRYTRRKNRICYLQEIFSNEMAKVDENFFQRLDDSFYVPEDKRGDKYPIFGTLKEEKDYHKEFPTIYHLRKHLADSDEKADLRLVYLALAHIIKYRGHFLIEGELDSRNTDIQKTFKDFLEIFDRTFEESHLQEELIDVESILTEKISKSRRVEKLLKKFPNQKKNTIFAEFLKLIVGNTADFKKVFNLEEDAKLQFSKETYDEDLEELLGEIGDEYADLFSSAKKLYDAILLSGILTGKDNSTKAPLSASMVQRYEEHKEDLKKLKKFIKKNAPEKYNEIFKDKAKNGYAGYIENKTKQEDFYKYLKKLLTKVEGSDYFLDKIEREDFLRKQRTFDNGVIPHQVHLQELKAIIRNQEKYYPFLKENQDKIEKILTFRIPYYVGPLARKKSRFAWAERKSDEKITPWNFDDVIDKEKSAEKFITRMTNNDLYLPEEKVLPKHSLLYEKFTVYNELTKVRYINEQGKEEKFFDANLKQEIFNDVFKKERKVTKKKLLDYLEKEFDELRIVDITGLDKRFNSSLGTYHDLKKILFDKSFLDDPDNQEMIEEIIQTLTLFEDKKMIKKRLEKYSDILTKSQIKKLEKRHYTGWGRLSAKLINGIRDKETGKTIMDYLIDDGYTNRNFMQLIHDDNLSFKDIISEAQIIKDEDSLHEHIANLAGSPAIKKGILQTVKVVDELVKVMGRHKPENIVIEMARENQTTQKGQRRSQQRLKLLQDSVKNLASKILKEYPTDNQKLQSDRLFLYYLQNGKDMYTGEPLDIDNLSQYDIDHIIPQAFIKDDSIDNRVLVSSAEARGKSDDVPSIEIVNKMKGFWKKLLDAGLISKRKYDNLTKAERGGLSELDKAGFIKRQLVETRQITKHVAQILDSRMNTKYDENDKLIREVKVITLKSKLVSDFRKDFQFYKVREINNYHHAHDAYLNAVVGTALIKKYPKLESEFVYGDYKVYDVRKMIAKSEQEIGKATAKYFFYSNIMNFFKTEITLANGEIRKRPLIETNGETGEIVWDKGRDFATVRKVLSMPQVNIVKKTEVQTGGFSKESILPKRNSDKLIARKKDWDPKKYGGFDSPTVAYSVLVVAKVEKGKSKKLKSVKELLGITIMERSSFEKNPIDFLEAKGYKEVKKDLIIKLPKYSLFELENGRKRMLASAGELQKGNELALPSKYVNFLYLASHYEKLKGSPEDNEQKQLFVEQHKHYLDEIIEQISEFSKRVILADANLDKVLSAYNKHRDKPIREQAENIIHLFTLTNLGAPAAFKYFDTTIDRKRYTSTKEVLDATLIHQSITGLYETRIDLSQLGGD

SEQ ID NO: 202 - protein, 1368 aa, synthetic construct
MDKPYSIGLDIGTNSVGWAVITDEYKVPSKKFKVLGNTDRHSIKKNLIGALLFDSGETAEATRLKRTARRRYTRRKNRICYLQEIFAEEMNKVDDSFFHRLEESFLVEEDKRYERHPIFGNIVDEVAYHEKYPTIYHLRKELADSDEKADLRLIYLALAHIIKFRGHFLIEGDLSSENTDVQKLFLQFVQTYNQLFEESNLNEETVDAEAILTAKMSKSRRLENLIAQFPAEKKNGLFGNLVALSLGLTPNFKSNFELTEDAKLQFSKDTYDEDLENLLAQIGDQYADLFLAAKNLYDAILLSGILTVNTEITKAPLSASMIKRYDEHHQDLTLLKVFVRDQLPEKYKEIFFDDTKNGYAGYIDGGASQEEFYKYIKPILIKIDGSEELLEKIEREDFLRKQRTFDNGSIPHQIHLQELHAILRRQGKYYPFLKENQEKIEKILTFRIPYYVGPLARGNSRFAWMTRKSNETITPWNFEEVVDKEASAQAFIERMTNFDKNLPCEKVLPKHSLLYEKFTVYNELTKVKYITEGMRKPAFLSSNQKKEIVDLLFKKNRKVTVKQLKEFLTKKIECFDSVEISGVEDKFNASLGTYHDLLKIIKDKDFLDNEENEDILEDIVLTLTLFEDREMIEKRLSKYADLFDKKVLKKLKRRRYTGWGRLSAKLINGIRDKQSGKTILDYLIDDGFANRNFMQLIHDDSLTFKEEIAKAQVIGNSDSLHETIANLAGSPAIKKGILQSIKIVDELVKVMGRHNPENIVIEMARENQTTQKGQKNSRERLKRLEEAIKELGSQILKEHPVDNTQLQNDKLYLYYLQNGKDMYTGEELDIDRLSDYDVDHIIPQSFIKDDSIDNRVLVSSAKARGKSDNVPSEEVVKKMKNFWSKLLNAKLISQRKFDNLTKAERGGLSELDKAGFIKRQLVETRQITKHVAQILDSRFNTKYDENDKLIRKVKIITLKSKLVSDFRKDFGLYKVREINNYHHAHDAYLNAVVGKALIKKYPKLESEFVYGDYPVYNSAKMIAKSEQEIGKATAKYFFYSNIMNFFKTEITLANGEIRKRPLIETNEETGEIVWDKEKHFATVRKVLSMPQVNIVKKTEVQTGGFSKESILPKRDSDKLIARKKDWDTKKYGGFDSPTVAYSVLVIADIEKGKTKKLKTVKELVGITIMERSAFEKDPIAFLEDKGYQNIQKEKIIKLPKYSLFELENGRKRLLASAGELQKGNELALPGKYVTLLYHAKHYEKLKESPEDNEKHKYYVEQHRDEFDEILEQISEFSERYILADSNLEKIRELYDKNSNKSISELAESFINLLTFTAFGAPAAFKFFGQTIDRKRYTSTTEILNATLIHQSITGLYETRIDLSQLGGD

SEQ ID NO: 203 - protein, 1368 aa, synthetic construct
MKKPYSIGLDIGTNSVGWAVVTDDYKVPAKKMKVLGNTDKSHIKKNLLGALLFDSGNTAEDRRLKRTARRRYTRRRNRILYLQEIFSEEMGKVDDSFFHRLEDSFLVPEDKRGERHPIFGNLEEEVKYHENFPTIYHLRKYLADSPEKADLRLVYLALAHIIKFRGHFLIEGKLDTRNNDVQRLFQEFLEVYDNTFERSSLQEQNVQVEEILTDKISKSAKKDRILKLFPNEKSNGRFAEFLKLIVGNQADFKKHFELEEKAPLQFSKDTYEEDLENLLAQIGDEYADLFLSAKKLYDSILLSGILTVTDVSTKAPLSASMIQRYKEHQMDLTQLKQFIRQKLSDKYNEVFSDVSKDGYAGYIDGKTTQEAFYKYLKGLLNKIEGSEYFLDKIEREDFLRKQRTFDNGSIPHQIHLQEMRAIIRRQAEFYPFLAENQDKIEKILTFRIPYYVGPLARGKSDFAWLSRKSAEKITPWNFDEIVDKESSAEAFINRMTNYDLYLPNEKVLPKHSLLYEKFTVYNELTKVKYKTEQMGKTAFFDANMKQEIFDGVFKVYRKVTKDKLMDFLEKEFDEFRIVDLTGLDKAFNASLGTYHDLRKILNDKDFLDNSKNEKILEDIVLTLTLFEDREMIRKRLENYSDLLTKEQLKKLERRHYTGWGRLSAKLINGIRNKESRKTILDYLIDDGNSNRNFMQLINDDALSFKEEIAKAQVIGETDNLNQVVSDLAGSPAIKKGILQSLKIVDELVKIMGNHNPENIVVEMARENQFTNQGRRNSQQRLKGLTDSIKEFGSQILKEHPVENSQLQNDRLFLYYLQNGRDMYTGEELDIDYLSQYDIDHIIPQAFIKDDSIDNRVLVSSAEARGKSDDVPSKDVVRKMKSYWSKLLSAKLITQRKFDNLTKAERGGLTDDDKAGFIKRQLVETRQITKHVARILDERFNTETDENNKKIRQVKIVTLKSNLVSNFRKEFELYKVREINDYHHAHDAYLNAVVGKALLKKYPKLEPEFVYGEYPKFNSYKFVAKTKEEENKATAKMFFYSNIMNFFKKDVKLADGSIVERPVVEVNDETGEIIWDKDKHISTIKKVLSYPQVNIVKKVEEQTGGFSKESILPKGNSDKLIPRKTKWDTKKYGGFDSPIVAYSVLVIADIEKGKSKKLKTVKELVGITIMEKMTFEKDPVAFLERKGYQNIQEENIIKLPKYSLFELENGRKRLLASAKELQKGNEIVLPNHLVTLLYHAKNIHKVDEKEEEIPKHLEYVDKHKDEFKELLDVVSNFSKKYTLAEKNLEKIKELYAQNNSADIKELASSFINLLTFTAIGAPATFKFFDKNIDRKRYTSTTEILNATLIHQSITGLYETRIDLSKLGGD

SEQ ID NO: 204 - protein, 1368 aa, synthetic construct
MKKPYSIGLDIGTNSVGWAVVTDDYKVPSKKMKVLGNTDRQSIKKNLLGALLFDSGETAEATRLKRTARRRYTRRKNRICYLQEIFSNEMAKVDDSFFHRLEESFLVEEDKKHERHPIFGNIVDEVAYHEKYPTIYHLRKKLVDSTDKADLRLIYLALAHMIKFRGHFLIEGDLNPDNSDVDKLFIQLVQTYNQLFEENPINASGVDAKAILSARLSKSRRLENLIAQLPGEKKNGLFGNLIALSLGLTPNFKSNFDLAEDAKLQLSKDTYDDDLDNLLAQIGDQYADLFLAAKNLSDAILLSDILRVNTEITKAPLSASMIKRYDEHHQDLTLLKALVRQQLPEKYKEIFFDQSKNGYAGYIDGGASQEEFYKFIKPILEKMDGTEELLVKLNREDLLRKQRTFDNGSIPHQIHLGELHAILRRQEDFYPFLKDNREKIEKILTFRIPYYVGPLARGNSRFAWMTRKSEETITPWNFEEVVDKGASAQSFIERMTNFDKNLPNEKVLPKHSLLYEYFTVYNELTKVKYVTEGMRKPAFLSGEQKKAIVDLLFKTNRKVTVKQLKEDYFKKIECFDSVEISGVEDRFNASLGTYHDLLKIIKDKDFLDNEENEDILEDIVLTLTLFEDREMIEERLKTYAHLFDDKVMKQLKRRRYTGWGRLSRKLINGIRDKQSGKTILDFLKSDGFANRNFMQLIHDDSLTFKEDIQKAQVSGQGESLHEQVADLAGSPAIKKGILQSLKIVDEIVKVMGRYAPQNIVVEMARENQTTAKGQRNSRERLKRLEEALKKLGSKILKEHPVENSQLQSDRLYLYYLQNGKDMYTGEELDIDRLSQYDVDHIIPQSFIKDDSIDNRVLTSSKEARGKSDDVPSEDVVRKMKPYWSKLLRSNLISQRKFDNLTKAERGGLTQDDKAGFIKRQLVETRQITKHVAQILDSRFNKEFDDNNKLIREVKIVTLKSKLVSQFRKEFGLYKVREINDYHHAHDAYLNAVVGKALIKKYPKLEPEFVYGDYPKYNSHKLIGKSDKERGKATAKMFFYSNIMNFFKSDVKLADGTIFERPPIEVNEETGEIVWDKTKHIATVKKVLSMPQVNIVKKTEVQTGGFSKESILPKRESDKLIARKKGWDTSKYGGFDSPTVAYSILVIAKVEKGKAKKLKTVKELVGITIMEQSAFEKDPVKFLEDKGYQDIQEHLIIKLPKYSLFELENGRKRLLASAGELQKANELALPQKLVTLLYHAKNIESSSEKSEDESHHRYYVSNHYKEFDEIFDQIVEFSERYILADKNIEKIRELFDQNESLSISELAQSFINLFTFTALGAPADFKFLNKDIDRKRYTSPSEILNSTLIHQSITGLYETRIDLSKLGGD

SEQ ID NO: 205 - protein, 1368 aa, synthetic construct
MKKPYSIGLDIGTNSVGWAVVTDDYKVPAKKMKVLGNTDKSHIKKNLLGALLFDSGNTAEDRRLKRTARRRYTRRRNRILYLQEIFSEEMGKVDDSFFHRLEDSFLVPEDKRGERHPIFGNLEEEVKYHENFPTIYHLRKYLADNPEKADLRLVYLALAHIIKFRGHFLIEGKFDTRNNDVQRLFQEFLAVYDNTFENSSLQEQNVQVEEILTDKISKSAKKDRVLKLFPNEKSNGRFAEFLKLIVGNQADFKKHFELEEKAPLQFSKDTYEEDLEVLLAQIGDEYAELFLSAKKLYDSILLSGILTVTDVSTKAPLSASMIQRYNEHQMDLTQLKQFIRQKLSDKYNEVFSDVSKNGYAGYIDGKTNQEDFYKYLKKLLNKIEGSGYFLDKIEREDFLRKQRTFDNGSIPHQIHLQEMRAIIRRQAEFYPFLAENQDKIEKILTFRIPYYVGPLARGKSDFAWLSRKSADKITPWNFDEIVDKESSAEAFINRMTNYDLYLPNQKVLPKHSLLYEKFTVYNELTKVKYKTEQMGKTAFFDANMKQEIFDGVFKVYRKVTKDKLMDFLEKEFDEFRIVDLTGLDKAFNASYGTYHDLRKILKDKDFLDNSKNEKILEDIVLTLTLFEDREMIRKRLENYSDLLTKEQLKKLERRHYTGWGRLSAKLIHGIRNKESRKTILDYLIDDGNSNRNFMQLINDDALSFKEEIAKAQVIGETDNLNQVVSDIAGSPAIKKGILQSLKIVDELVKIMGTHQPENIVVEMARENQFTNQGRRNSQQRLKGLTDSIKEFGSQILKEHPVENSQLQNDRLFLYYLQNGRDMYTGEELDIDYLSQYDIDHIIPQAFIKDNSIDNRVLVSSKEARGKSDDVPSKEVVRKMKSYWSKLLSAKLITQRKFDNLTKAERGGLTDDDKAGFIKRQLVETRQITKHVARILDERFNTETDENNKKIRQVKIVTLKSNLVSNFRKEFELYKVREINDYHHAHDAYLNAVVGKALLGKYPQLEPEFVYGEYPKFNSHKLVAKSKSEENKATAKKFFYSNIMNFFKKDVKLADGSIIERPMIERNDETGEIIWDKDKHISTVKKVLSYPQVNIVKKVEEQTGGFSKESILPKGNSDKLIPRKTKWDTKKYGGFDSPIVAYSVLVIADIEKGKSKKLKTVKALVGITIMEKMTFERNPVAFLERKGYRNIQEENIIKLPKYSLFELENGRKRLLASARELQKGNEIVLPNHLGTLLYHAKNIHKVDEKEEDIPKHLDYVDKHKDEFKELLDVVSNFSKKYTLAEKNLEKIKELYAQNNGADIKELASSFINLLTFTALGAPATFKFFDKNIDRKRYTSTTEILNATLIHQSITGLYETRIDLSKLGGD

SEQ ID NO: 206 - protein, 1368 aa, synthetic construct
MKKKYSIGLDIGTNSVGWAVITDEYKVPSKKFKVLGNTDRQSIKKNLLGALLFDSGETAEATRLKRTARRRYTRRKNRILYLQEIFSEEMAKVDDSFFHRLEESFLVEEDKRGERHPIFGNIVDEVAYHEKYPTIYHLRKKLADSTEKADLRLIYLALAHIIKFRGHFLIEGDLNSENSDVQKLFIQLVQTYNQLFEENHINEEGVDASAILSARLSKSRRLENLIAQFPGEKKNGLFGNLIALSLGLTPNFKSNFDLAEDAKLQLSKDTYDEDLDNLLAQIGDQYADLFSAAKNLSDAILLSGILTVNDEKTKAPLSASMIKRYDEHHQDLTLLKALVRQQLPEKYKEIFFDQSKNGYAGYIDGGASQEEFYKFIKPILEKMDGTEEFLDKINREDFLRKQRTFDNGSIPHQIHLGELHAILRRQEDFYPFLKENREKIEKILTFRIPYYVGPLARGNSRFAWMTRKSEETITPWNFEEVVDKEASAQSFIERMTNFDKNLPNEKVLPKHSLLYEYFTVYNELTKVKYVTEGMGKPEFLSAEQKEEIVDLLFKKNRKVTVKKLKEDLFKKIECFDSVEISGVEDRFNASLGTYHDLLKIIKDKDFLDNEENEDILEDIVLTLTLFEDREMIEERLEKYADLFDKKVLKQLKRRRYTGWGRLSAKLINGIRDKQSGKTILDFLKDDGFANRNFMQLIHDDSLTFKEEIQKAQVSGQTDSLHEVIANLAGSPAIKKGILQSIKIVDELVKVMGRHKPENIVIEMARENQTTQKGQKNSRERMKRIEEGIKELGSQILKEHPVENTQLQNEKLYLYYLQNGRDMYVDQELDINRLSDYDVDHIVPQSFLKDDSIDNKVLTRSDKARGKSDNVPSEEVVKKMKNYWRQLLNAKLITQRKFDNLTKAERGGLSELDKAGFIKRQLVETRQITKHVAQILDSRFNTETDENDKLIREVKIITLKSKLVSDFRKDFGFYKVREINHYHHAHDAYLNAVVGTALIKKYPKLESEFVYGDYKVYDVRKMIAKSEQEIGKATAKYFFYSNIMNFFKSEITLANGEIRKRPQIETNEETGEIVWDKEKDFATVKKVLSMPQVNIVKKTEVQTGGFSKESILPKRNSDKLIARKKDWDTKKYGGFDSPTVAYSVLVVAKVEKGKSKKLKPVKELVGITIMERSSFEKDPIAFLESKGYKDIQKDKIIKLPKYSLFELENGRKRLLASAGELQKGNELALPNKYVTLLYHASHYEKLKESEEDNKEHQEYVEQHRDYFDEIFEQISEFSERYILADKNLEKIEELYKENEDKDISELAENFIHLFTFTALGAPAAFKFFDATIDRKRYTSTTEILNATLIHQSITGLYETRIDLSQLGGD

SEQ ID NO: 207 - protein, 1368 aa, synthetic construct
MDKPYSIGLDIGTNSVGWAVVTDEYKVPSKKFKVLGNTDRHSIKKNLLGALLFDSGETAEATRLKRTARRRYTRRKNRILYLQEIFAEEMNKVDPSFFHRLEESFLVEEDKRGERHPIFGNIVEEVAYHEKYPTIYHLRKHLADSTEKADLRLIYLALAHIIKFRGHFLIEGDLNAENTDVQELFKDFVQVYDQTFEESHLSEETVDAEEILTEKISKSRKLENLIKQFPNEKKNGLFGNLLALSLGLQPNFKSNFKLSEDAKLQFSKDTYDEDLENLLGQIGDEYADLFVAAKNLYDAILLSGILTVTTEITKAPLSASMIKRYDEHHQDLTLLKKFIRQNLPEKYKEIFFDKSKNGYAGYIDGGASQEDFYKYIKNILSKLDGSEYFLDKIEREDFLRKQRTFDNGSIPHQIHLQELKAILRRQGEYYPFLKENQEKIEKILTFRIPYYVGPLARGNSRFAWASRKSDETITPWNFEEVVDKEASAQAFITRMTNFDKNLPEEKVLPKHSLLYEKFTVYNELTKVKYVTEGMRKPAFFDANQKQEIFDHLFKKNRKVTKKKLLEFLFKEFDEFRIVDISGVEKSFNASLGTYHDLLKIIKDKEFLDNEENEKILEDIVLTLTLFEDREMIKKRLEKYADLFTKKVLKKLERRRYTGWGRLSAKLINGIRDKQSGKTILDYLIDDGFANRNFMQLIHDDSLSFKEEIAKAQVIGETDSLHQVIANLAGSPAIKKGILQSIKIVDELVKVMGRYNPENIVVEMARENQTTQKGQRNSRERLKRLEEAIKELGSKILKEHPVENTQLQNDKLYLYYLQNGKDMYTGEELDIDRLSDYDVDHIIPQSFIKDDSIDNRVLTSSAKARGKSDDVPSEEVVKKMKSFWQQLLKAKLISQRKFDNLTKAERGGLTELDKAGFIKRQLVETRQITKHVAQILDSRFNTKYDENDKLIRKVKIITLKSKLVSNFRKDFELYKVREINDYHHAHDAYLNAVVGTALIKKYPKLESEFVYGDYPVYNSYKMIAKSEQEIGKATAKYFFYSNIMNFFKSDITLANGEIRKRPLIETNEETGEIAWDKDKDIATVRKVLSMPQVNIVKKTEVQTGGFSKESILPKRDSDKLIARKKDWDTKKYGGFDSPTVAYSVLVVADIEKGKAKKLKTVKELVGITIMERSAFEKNPIAFLEDKGYQNIQKENIIKLPKYSLFELENGRKRLLASAGELQKGNELALPNKYVTLLYHAKHYEKLKESPEDNPEHLEYVDKHRDEFDEILDQISEFSKRYILADKNLEKIKELYKKNEDADIEELASSFINLLTFTALGAPAAFKFFGATIDRKRYTSTTEILNATLIHQSITGLYETRIDLSQLGGD

SEQ ID NO: 208 - protein, 1368 aa, synthetic construct
MKKKYSIGLDIGTNSVGWAVITDEYKVPSKKFKVLGNTDRQSIKKNLIGALLFDSGETAEATRLKRTARRRYTRRKNRIRYLQEIFAEEMSKVDDSFFHRLEESFLVEEDKRDERHPIFGNIVDEVAYHEKYPTIYHLRKKLADSTEKADLRLVYLALAHIIKFRGHFLIEGDLNSENSDVDKLFIQLVQTYNQLFEENPINEEGVDAKAILSAKLSKSRRLENLIAQIPGEKKNGLFGNLIALSLGLTPNFKSNFDLAEDAKLQLSKDTYDEDLDNLLAQIGDQYADLFLAAKNLSDAILLSDILTVDSESTKAPLSASMIKRYDEHHQDLTLLKALVREQLPEKYKEIFFDKSKNGYAGYIDGGASQEDFYKYIKPILEKLDGAEELLEKINREDFLRKQRTFDNGSIPHQIHLGELHAILRRQEDFYPFLKENREKIEKILTFRIPYYVGPLARGNSRFAWMTRKSDETITPWNFEEVVDKEASAQAFIERMTNFDKNLPDEKVLPKHSLLYEYFTVYNELTKVKYVTEGMRKPEFLSAEQKEEIVDLLFKKNRKVTVKQLKENYFKKIECFDSVEISGVEDRFNASLGTYHDLLKIIKDKEFLDNEENEDILEDIVLTLTLFEDKEMIEERLKKYANLFDKKVLKQLKRRRYTGWGRLSKKLINGIRDKQSGKTILDFLKSDGFANRNFMQLIHDDSLTFKEEIQKAQVKGQGDSLHEQIANLAGSPAIKKGILQTIKIVDEIVKVMGRHKPENIVIEMARENQTTQKGQKNSRERLKRLEEVLKELGSQILKEHPVENTQLQNDKLYLYYLQNGKDMYTGDELDIDRLSDYDVDHIIPQSFIKDDSIDNKVLTSSKEARGKSDNVPSEEVVKKMKSYWRQLLNAKLISQRKFDNLTKAERGGLSELDKAGFIKRQLVETRQITKHVAQILDSRFNTEYDENDKLIRRVKIITLKSKLVSDFRKDFGFYKVREINDYHHAHDAYLNAVVGTALIKKYPKLESEFVYGDYKVYDSRKMIAKSEQEIGKATAKMFFYSNIMNFFKSEIKLADGEIRKRPQIETNEETGEIVWDKEKDFATVRKVLSMPQVNIVKKTEVQTGGFSKESILPKRNSDKLIARKKDWDPKKYGGFDSPTVAYSVLVVAKVEKGKKKKLKSVKELVGITIMERSAFEKDPVDFLENKGYKDIQKDLIIKLPKYSLFELENGRKRLLASAGELQKGNELALPNKYVTFLYLASHYEKLKGSPEDEEQHQEYVEQHKYYFDEILEQIEEFSERYILADKNLEKILSLYNEKSDKSISEQAENISNLFTFTALGAPAAFKFFDTTIDRKRYTSTKEVLNATLIHQSITGLYETRIDLSQLGGD

SEQ ID NO: 209 - protein, 1368 aa, synthetic construct
MDKKYSIGLDIGTNSVGWAVVTDEYKVPSKKFKVLGNTDRKSIKKNLLGALLFDSGETAEATRLKRTARRRYTRRKNRIRYLQEIFAEEMAKVDDSFFHRLEESFLVEEDKRGERHPIFGNIVDEVAYHEKYPTIYHLRKHLADSDEKADLRLVYLALAHIIKFRGHFLIEGDLNSENSDVQKLFKELVQVYDQTFEESHLEEEGVDAEAILTEKLSKSRRLENLIAQFPGEKKNGLFGNLIALSLGLTPNFKSNFDLSEDAKLQFSKDTYDEDLEELLGQIGDEYADLFVAAKNLYDAILLSGILTVDDESTKAPLSASMIKRYDEHHQDLTLLKAFIREQLPEKYKEIFFDQSKNGYAGYIDGGASQEEFYKYLKKILEKIDGSEEFLDKIEREDFLRKQRTFDNGSIPHQIHLQELHAIIRRQEKYYPFLKENQEKIEKILTFRIPYYVGPLARGNSRFAWLSRKSDETITPWNFDEVVDKEKSAEAFIERMTNFDKNLPNEKVLPKHSLLYEKFTVYNELTKVKYVTEGMRKPEFFDAEQKQEIVDGVFKKNRKVTKKQLKEYLFKEFDEFRIVEISGVEDRFNASLGTYHDLLKIIKDKDFLDNEENEEILEDIILTLTLFEDREMIKKRLEKYADLFDKKQLKKLERRRYTGWGRLSAKLINGIRDKQSGKTILDYLIDDGFANRNFMQLIHDDSLTFKEEIEKAQVIGDSESLHELIANLAGSPAIKKGILQSLKIVDELVKVMGRYEPENIVIEMARENQTTQKGQKNSRERMKRIEEGIKELGSQILKEHPVENTQLQNEKLYLYYLQNGRDMYVDQELDINRLSDYDVDHIVPQSFLKDDSIDNKVLTRSDKARGKSDNVPSEEVVKKMKNYWRQLLNAKLITQRKFDNLTKAERGGLSELDKAGFIKRQLVETRQITKHVAQILDSRFNTEYDENDKLIRDVKIITLKSKLVSDFRKDFELYKVREINNYHHAHDAYLNAVVGTALIKKYPKLESEFVYGDYKVYDVRKMIAKSEQEIGKATAKYFFYSNIMNFFKSDITLANGEIRKRPLIETNEETGEIVWDKEKDIATVRKVLSMPQVNIVKKTEVQTGGFSKESILPKRDSDKLIARKKDWDTKKYGGFDSPTVAYSVLVIADVEKGKAKKLKTVKELVGITIMERSAFEKNPVAFLEDKGYQNIKKDNIIKLPKYSLFELENGRKRLLASAGELQKGNELALPQKYVTLLYHAKHYEKLKGSPEDNEEKQLYVEEHKDEFDEILDQISEFAKRYILADANLEKLKKLYEKNRDASIEELAENFIHLLTFTALGAPAAFKFFGKTIDRKRYTSTKEILNATLIHQSITGLYETRIDLSKLGGD

SEQ ID NO: 210 - protein, 1368 aa, synthetic construct
MDKKYSIGLDIGTNSVGWAVITDEYKVPSKKFKVLGNTGRKSIKKNLIGALLFDSGETAEATRLKRTARRRYTRRKNRIRYLQEIFADEMSKVDDSFFHRLEESFLVEEDKKNERHPIFGNIVEEVAYHEKYPTIYHLRKKLVDSDEKADLRLIYLALAHMIKFRGHFLIEGDLNPDNSDVDKLFHQLVQTYNQLFEEDPIEAEGVDAKAILSARLSKSRRLENLIAELPGEKKNGLFGNLIALSLGLTPNFKSNFDLAEDAKLQLSKDTYDDDLENLLGQIGDQYADLFVAAKNLSDAILLSDILRVNTESTKAPLSASMIKRYDEHHQDLTLLKQLVRKQLPEKYKEIFFDQSKNGYAGYIDGGASQEEFYKFIKPILEKMDGTEELLAKLEREDLLRKQRTFDNGSIPHQIHLGELHAILRRQEKYYPFLKENREKIEKILTFRIPYYVGPLARGNSRFAWMTRKSDETITPWNFEEVVDKGASAQSFIERMTNFDKNLPEEKVLPKHSLLYEYFTVYNELTKVKYVTEGMRKPEFLSGEQKKAIVDLLFKKNRKVTVKQLKEYYFKNFECFDSVEISGVEDRFNASLGTYHDLLKIIKDKDFLDNEENEKILEDIVLTLTLFEDREMIKKRLEKYADLFDKKVMKQLKRRRYTGWGRLSRKLINGIRDKQSGKTILDFLKEDGFTNRNFMQLIHDDSLTFKDDIKKAQVIGQSDSLHEHIANLAGSPAIKKGILQTVKVVDELVKVMGRYKPENIVIEMARENQTTQKGQKNSRERMKRIEEGIKELGSQILKEHPVENTQLQNEKLYLYYLQNGRDMYVDQELDINRLSDYDVDHIVPQSFLKDDSIDNKVLTRSDKARGKSDNVPSEEVVKKMKNYWRQLLNAKLITQRKFDNLTKAERGGLSELDKAGFIKRQLVETRQITKHVAQILDSRMNTKYDENDKLIRDVKVITLKSKLVSDFRKDFQFYKVREINNYHHAHDAYLNAVVGTALIKKYPKLESEFVYGDYKVYDVRKMIAKSEQEIGKATAKYFFYSNIMNFFKSEITLANGEIRKRPLIETNGETGEIVWDKERDFATVRKVLSMPQVNIVKKTEVQTGGFSKESILPKRDSDKLIARKKDWDPKKYGGFDSPTVAYSVLVVAKVEKGKAKKLKTVKELLGITIMERSEFEKDPIAFLEDKGYKEVKKDLIIKLPKYSLFELENGRKRMLASAGELQKGNELALPSKYVNFLYLASNYEKLKGSEEDNKKKQLYVEQHKEYLDEIIDQISEFSERVILADANLEKVLSAYEKHRDKSIEEQAENIIHLFTLTNLGAPAAFKYFNTNIDRKRYTSTKEVLNATLIHQSITGLYETRIDLSQLGGD

SEQ ID NO: 211 - protein, 1368 aa, synthetic construct
MKKKYSIGLDIGTNSVGWAVITDEYKVPSKKFKVLGNTDRHSIKKNLIGALLFDSGETAEATRLKRTARRRYTRRKNRIRYLQEIFASEMAKVDDSFFHRLEESFLVEEDKDHERHPIFGNIVDEVAYHEKYPTIYHLRKKLADSDEKADLRLIYLALAHMIKFRGHFLIEGDLNSENTDVDKLFIQLVQTYNQLFEENPINEEGVDAKAILSAKLSKSRRLENLIAQFPGEKRNGLFGNLIALSLGLTPNFKSNFDLAEDAKLQLSKDTYDEDLDNLLGQIGDQYADLFLAAKNLSDAILLSDILTVNDETTKAPLSASMIKRYDEHHQDLTLLKALVRQQLPEKYKEIFFDDTKNGYAGYIDGGASQEEFYKYIKPILEKLDGTEYFLAKINREDFLRKQRTFDNGSIPHQIHLGELHAILRRQEEFYPFLKENREKIEKILTFRIPYYVGPLARGNSRFAWMKRKSDETITPWNFEEVVDKEASAQAFIERMTNFDKNLPNEKVLPKHSLLYEYFTVYNELTKVKYVTEGMRKPEFLSAEQKEAIVDLLFKTNRKVTVKQLKEDYFKKIDCFDSVEISGVEDRFNASLGTYHDLLKIIKDKDFLDNEENEDILEDIVLTLTLFEDREMIEERLEKYADLFDKKVLKQLKRRRYTGWGRLSAKLINGIRDKQSGKTILDFLKSDGFANRNFMQLIHDDSLTFKEDIQKAQVKGQSDSLHEQIADLAGSPAIKKGILQSIKIVDELVKVMGRHKPENIVIEMARENQTTQKGQKNSRERMKRIEEGIKELGSQILKEHPVENTQLQNEKLYLYYLQNGRDMYVDQELDINRLSDYDVDHIVPQSFLKDDSIDNKVLTRSDKARGKSDNVPSEEVVKKMKNYWRQLLNAKLITQRKFDNLTKAERGGLSELDKAGFIKRQLVETRQITKHVAQILDSRFNTNRDENDKLIRDVKIITLKSKLVSDFRKDFEFYKVREINDYHHAHDAYLNAVVGTALIKKYPKLESEFVYGDYKVYDVRKMIAKSEQEIGKATAKYFFYSNIMNFFKTDITLANGEIRKRPLIETNEETGEIVWDKTKDFATVRKVLSMPQVNIVKKTEVQTGGFSKESILPKRESDKLIARKKDWDPKKYGGFDSPTVAYSVLVVAKVEKGKAKKLKTVKELVGITIMERSSFEKNPVAFLEDKGYKDIQEELIIKLPKYSLFELENGRKRLLASAGELQKGNELALPSKYVTFLYLASHYEKLKGKPEDNEQKKEYVKQHKDEFDEILDQISEFSERYILADANLDKVLSLYNNNRDKDISELAENFIHLFTFTALGAPAAFKFFDTDIDRKRYTSTTEVLNATLIHQSITGLYETRIDLSQLGGD

SEQ ID NO: 212 - protein, 1368 aa, synthetic construct
MKKPYSIGLDIGTNSVGWAVVTDEYKVPSKKFKVLGNTDRSSIKKNLLGALLFDSGETAEATRLKRTARRRYTRRKNRILYLQEIFAEEMNKVDDSFFHRLEESFLVEEDKRGERHPIFGNIVDEVAYHEKYPTIYHLRKHLADSTEKADLRLVYLALAHIIKFRGHFLIEGDLDAENTDVQKLFKKFVEVYDQTFEESHLSEETVDAEAILTEKLSKSRRLENLIAQFPNEKKNGLFGNLIALSLGLQPNFKTNFELSEDAKLQFSKDTYDEDLENLLGQIGDEYADLFVAAKNLYDAILLSGILTVNDESTKAPLSASMIKRYDEHHQDLTLLKAFIRKNLPEKYKEIFFDESKNGYAGYIDGGASQEEFYKYIKKLLSKIDGSEYFLDKIEREDFLRKQRTFDNGSIPHQIHLQELKAILRRQEEYYPFLKENQEKIEKILTFRIPYYVGPLARGNSRFAWASRKSDETITPWNFDEVVDKEKSAEAFIERMTNNDKNLPDEKVLPKHSLLYEKFTVYNELTKVKYVTEGMGKAQFFDANMKQEIFDGLFKKERKVTKKKLLDFLFKEFDEFRIVDISGVEDAFNASLGTYHDLLKIIKDKEFLDNEENEKILEDIVLTLTLFEDREMIKKRLSKYADLFDKKQLKKLERRRYTGWGRLSAKLINGIRDKQTGKTILDYLIDDGFANRNFMQLIHDDSLSFKEEIAKAQVIGDSDSLHEVIADLAGSPAIKKGILQSLKIVDELVKVMGRYAPENIVVEMARENQTTQKGQRNSRERLKRLEEAIKELGSKILKEHPVENTQLQNDKLYLYYLQNGKDMYTGEELDIDRLSDYDVDHIIPQSFIKDDSIDNRVLVSSAKARGKSDDVPSEEVVKKMKSFWSQLLNAKLISQRKFDNLTKAERGGLTELDKAGFIKRQLVETRQITKHVAQILDERFNTEFDENNKLIRNVKIITLKSKLVSQFRKEFELYKVREINDYHHAHDAYLNAVVGKALIKKYPKLESEFVYGDYPVYNSYKLVAKSDSEIGKATAKMFFYSNIMNFFKSDIKLADGTIVERPQIEVNEETGEIVWDKEKHIATVRKVLSMPQVNIVKKTEVQTGGFSKESILPKRDSDKLIARKKDWDTKKYGGFDSPTVAYSVLVVADIEKGKAKKLKTVKELVGITIMERSAFEKNPVAFLEDKGYQNIQEENIIKLPKYSLFELENGRKRLLASAGELQKGNELALPQKYVTLLYHAKHYEKLKEKSEDREKHLEYVEQHRDEFDEILDQISEFSKRYILADKNLEKIEELYNKNEDASIEELASSFINLLTFTALGAPAAFKFFGKTIDRKRYTSTKEILNATLIHQSITGLYETRIDLSKLGGD

SEQ ID NO: 213 - protein, 1368 aa, synthetic construct
MDKKYSIGLDIGTNSVGWAVITDEYKVPSKKFKVLGNTDRHSIKKNLIGALLFDSGETAEATRLKRTARRRYTRRKNRIRYLQEIFAEEMAKVDDSFFHRLEESFLVEEDKKHERHPIFGNIVDEVAYHEKYPTIYHLRKKLADSTDKADLRLIYLALAHMIKFRGHFLIEGDLNSDNSDVDKLFIQLVQTYNQLFEENPINESGVDAKAILSAKLSKSRRLENLIAQLPGEKKNGLFGNLIALSLGLTPNFKSNFDLSEDAKLQLSKDTYDEDLDNLLAQIGDQYADLFLAAKNLSDAILLSDILTVNSEITKAPLSASMIKRYDEHHQDLTLLKALVRQQLPEKYKEIFFDKSKNGYAGYIDGGASQEEFYKYIKPILEKMDGTEELLAKINREDLLRKQRTFDNGSIPHQIHLGELHAILRRQEDFYPFLKENREKIEKILTFRIPYYVGPLARGNSRFAWMTRKSEETITPWNFEEVVDKEASAQAFIERMTNFDKNLPNEKVLPKHSLLYEYFTVYNELTKVKYITEGMRKPEFLSGEQKKAIVDLLFKKNRKVTVKQLKEDYFKKIECFDSVEISGVEDRFNASLGTYHDLLKIIKDKDFLDNEENEDILEDIVLTLTLFEDKEMIEERLKKYAHLFDKKVLKQLKRRRYTGWGRLSRKLINGIRDKQSGKTILDFLKSDGFANRNFMQLIHDDSLTFKEAIQKAQVSGQGDSLHEQIANLAGSPAIKKGILQTVKIVDELVKVMGRHKPENIVIEMARENQTTQKGQKNSRERMKRIEEGIKELGSQILKEHPVENTQLQNEKLYLYYLQNGRDMYVDQELDINRLSDYDVDHIVPQSFLKDDSIDNKVLTRSDKARGKSDNVPSEEVVKKMKNYWRQLLNAKLITQRKFDNLTKAERGGLSELDKAGFIKRQLVETRQITKHVAQILDSRFNTEYDENDKLIREVKIITLKSKLVSDFRKDFQFYKVREINNYHHAHDAYLNAVVGTALIKKYPKLESEFVYGDYKVYDVRKMIAKSEQEIGKATAKYFFYSNIMNFFKTEITLANGEIRKRPLIETNEETGEIVWDKGKDFATVRKVLSMPQVNIVKKTEVQTGGFSKESILPKRNSDKLIARKKDWDTKKYGGFDSPTVAYSVLVVAKVEKGKTKKLKTVKELVGITIMERSSFEKDPVAFLEAKGYKEVRKDLIIKLPKYSLFELENGRKRLLASAGELQKGNELALPQKYVTFLYLASHYEKLKGKPEDNEQKLEYVEQHRDEFDEIFEQISEFSERYILADKNLDKILSLYNNIEDKSIEELAENFIHLFTFTSLGAPAAFKFFDTTIDRKRYTSTTEILDATLIHQSITGLYETRIDLSQLGGD

SEQ ID NO: 214 - protein, 1368 aa, synthetic construct
MDKPYSIGLDIGTNSVGWAVVTDEYKVPSKKFKVLGNTDRHSIKKNLLGALLFDSGETAEATRLKRTARRRYTRRKNRIRYLQEIFAEEMNKVDDSFFHRLEESFLVEEDKRGERHPIFGNIVEEVAYHENYPTIYHLRKELADSTEKADLRLVYLALAHIIKFRGHFLIEGDLNSENTDVQKLFIKFVQTYNNTFEESHLSEINVDAESILTAKLSKSRRLENLIKYFPNEKKNGLFGNLIALSLGLQPNFKTNFDLSEDAKLQFSKDTYEEDLENLLAQIGDQYADLFVAAKNLYDAILLSGILTVNTEITKAPLSASMIKRYDEHHQDLTLLKDFIRQQLPEKYKEIFFDKSKNGYAGYIDGGAKQEEFYKYIKPILEKIDGTEYFLDKINREDFLRKQRTFDNGSIPHQIHLKELHAIIRRQAEFYPFLKENQEKIEKILTFRIPYYVGPLARGNSRFAWMSRKSDETITPWNFEEVVDKEASAQAFIERMTNYDKNLPEEKVLPKHSLLYEKFTVYNELTKVKYVTERMRKPAFFDANQKQEIVDGLFKKNRKVTVKQLKEFLFKEFDEFDSVEISGVEKRFNASLGTYHDLLKIIKDKDFLDNEENEKILEDIVLTLTLFEDREMIRKRLSKYADLFDKKVLKKLKRRRYTGWGRLSAKLINGIRDKQTGKTILDYLIDDGFANRNFMQLIHDDSLTFKEEIAKAQVIGKTDSLHEVIADLAGSPAIKKGILQSLKIVDELVKVMGRHNPENIVIEMARENQTTQKGQRNSRERLKRLEESIKELGSNILKEHPVDNTQLQNDKLYLYYLQNGKDMYTGEELDINRLSDYDVDHIIPQSFIKDDSIDNKVLTSSAKARGKSDNVPSIEVVRKMKSYWEQLLNAKLISQRKFDNLTKAERGGLTELDKAGFIKRQLVETRQITKHVAQILDSRFNTKYDENDKLIRDVKIITLKSKLVSNFRKDFGLYKVREINDYHHAHDAYLNAVVGTALIKKYPKLESEFVYGDYPVYNSYKMIAKSEQEIGKATAKYFFYSNIMNFFKSDITLANGEIRKRPLIETNDETGEIVWDKKKDFATVRKVLSMPQVNIVKKTEVQTGGFSKESILPKRNSDKLIARKKDWDTKKYGGFDSPTVAYSVLVIAKIEKGKAKKLKTVKELVGITIMERSSFEKNPVAFLEKKGYQNIQKEVIIKLPKYSLFELENGRKRLLASAGELQKGNELALPSKYVTLLYHASRYEKLKESPEDNEKHLEYVEKHREEFDEILDQISEFSKRYILADKNLEKILELYDKNNEASIEELAESFINLLTFTALGAPAAFKFFGTTIDRKRYTSTTEILSATLIHQSITGLYETRIDLSQLGGD

SEQ ID NO: 215 - protein, 1368 aa, synthetic construct
MKKKYSIGLDIGTNSVGWAVITDEYKVPSKKFKVLGNTDRKSIKKNLLGALLFDSGETAEATRLKRTARRRYTRRKNRIRYLQEIFAEEMSKVDDSFFHRLEESFLVEEDKKHERHPIFGNIVDEVAYHEKYPTIYHLRKKLADSTEKADLRLIYLALAHMIKFRGHFLIEGDLNPENSDVQKLFIQLVQTYNQLFEESPLEESTVDAKAILSAKLSKSRRLENLIAQFPGEKKNGLFGNLIALSLGLTPNFKSNFDLAEDAKLQLSKDTYDEDLDNLLAQIGDQYADLFLAAKNLSDAILLSDILTVNDEITKAPLSASMVKRYDEHHQDLTLLKALVRKQLPEKYKEIFFDKSKNGYAGYIDGGASQEEFYKFIKPILEKVDGTEELLEKLNREDFLRKQRTFDNGSIPHQIHLGELHAILRRQEDFYPFLKENREKIEKILTFRIPYYVGPLARGNSRFAWMTRKSEETITPWNFEEVVDKEASAEAFIERMTNFDKNLPEEKVLPKHSLLYEMFTVYNELTKVKYVTEGMGKPEFLSGEQKQEIVDLLFKTNRKVTVKQLKEDYFKKIECFDSVEISGVEDRFNASLGTYHDLLKIIKDKDFLDNEENEDILEDIVLTLTLFEDREMIEERLAKYADLFDKKVLKQLKRRRYTGWGRLSRKLINGIRDKQSGKTILDFLKDDGFANRNFMQLIHDDSLTFKEEIQKAQVSGKGDSLHEVIANLAGSPAIKKGILQSVKIVDELVKVMGRHAPENIVIEMARENQTTQKGQKNSRERMKRIEEGIKELGSQILKEHPVENTQLQNEKLYLYYLQNGRDMYVDQELDINRLSDYDVDHIVPQSFLKDDSIDNKVLTRSDKARGKSDNVPSEEVVKKMKNYWRQLLNAKLITQRKFDNLTKAERGGLSELDKAGFIKRQLVETRQITKHVAQILDSRFNTEYDENDKLIREVKIITLKSKLVSDFRKDFQFYKVREINDYHHAHDAYLNAVVGTALIKKYPKLESEFVYGDYKVYDVRKMIAKSDPEIGKATAKYFFYSNIMNFFKTEITLANGEIFKRPVIETNKETGEIVWDKEKDFATVRKVLSMPQVNIVKKTEVQTGGFSKESILPKRNSDKLIARKKDWDPKKYGGFDSPTVAYSVLVVAKVEKGKKKKLKTVKELVGITIMERSSFEKDPIAFLETKGYKDVQEDLIIKLPKYSLFELENGRKRLLASAGELQKGNELALPQKYVTFLYLAKRYEKLKGSLEDNEGKQEYVEQHKHYFDEIMDQIKEFSERYILADKNLEKLLSLFAENRDKDIEELAENFIHLFTLTSLGAPAAFKFFDTTIDRKRYTSTSEVLNATLIHQSITGLYETRIDLSQLGGD

SEQ ID NO: 216 - protein, 1368 aa, synthetic construct
MDKKYSIGLDIGTNSVGWAVITDEYKVPSKKFKVLGNTDRHSIKKNLIGALLFDSGETAEATRLKRTARRRYTRRKNRICYLQEIFSNEMAKVDDSFFHRLEESFLVEEDKRGERHPIFGNIVDEVAYHEKYPTIYHLRKHLADSTEKADLRLVYLALAHIIKFRGHFLIEGDLNSENTDVQKLFKQFVTTYDQTFEESHLNEETVDAKSILTEKLSKSRRLENLIKLFPGEKKNGLFGNLIALSLGLTPNFKSNFDLSEDAKLQFSKDTYDEDLENLLGQIGDEYADLFAAAKNLYDAILLSGILTVNDESTKAPLSASMIKRYDEHHQDLTLLKTFVRQQLPEKYKEIFFDESKNGYAGYIDGGASQEEFYKYIKPILEKMDGSEYFLDKIEREDFLRKQRTFDNGSIPHQIHLKELHAILRRQEEFYPFLKENREKIEKILTFRIPYYVGPLARGNSRFAWASRKSDETITPWNFDEVVDKEASAEAFIERMTNNDKNLPDEKVLPKHSLLYEKFTVYNELTKVKYVTEGMGKAQFFDAEQKQEIVDLLFKKYRKVTKKKLLDFLDKEFEEFRIVDISGVEDAFNASLGTYHDLLKIIKDKDFLDNEENEDILEDIVLTLTLFEDREMIEKRLEKYADLFDKKVLKKLERRRYTGWGRLSKKLINGIRDKQTGKTILDYLISDGFANRNFMQLIHDDSLSFKEEIAKAQVIGQGDSLHEHIANLAGSPAIKKGILQTVKVVDELVKVMGRHKPENIVIEMARENQTTQKGQKNSRERMKRIEEGIKELGSQILKEHPVENTQLQNEKLYLYYLQNGRDMYVDQELDINRLSDYDVDHIVPQSFLKDDSIDNKVLTRSDKARGKSDNVPSEEVVKKMKNYWRQLLNAKLITQRKFDNLTKAERGGLSELDKAGFIKRQLVETRQITKHVAQILDSRMNTKYDENDKLIREVKVITLKSKLVSDFRKDFQFYKVREINNYHHAHDAYLNAVVGTALIKKYPKLESEFVYGDYKVYDVRKMIAKSEQEIGKATAKYFFYSNIMNFFKTEITLANGEIRKRPLIETNGETGEIVWDKGRDFATVRKVLSMPQVNIVKKTEVQTGGFSKESILPKRDSDKLIARKKDWDTKKYGGFDSPTVAYSVLVVADIEKGKAKKLKTVKELVGITIMERSAFEKNPIAFLEDKGYQNIQEEKIIKLPKYSLFELENGRKRLLASAGELQKGNELALPAKYVTLLYHAKHYEKLKEKPEDNEKHLEYVTKHRDEFKEILDQISEFSERYILADKNLSKIKELYSKNESYSIEELASSFINLLTFTALGAPAAFKFLGKTIDRKRYTSTTEILNATLIHQSITGLYETRIDLSKLGGD

SEQ ID NO: 217 - protein, 1368 aa, synthetic construct
MKKPYSIGLDIGTNSVGWAVVTDDYKVPAKKMKVLGNTDKSHIKKNLLGALLFDSGNTAEDRRLKRTARRRYTRRRNRILYLQEIFSEEMNKVDDSFFHRLEDSFLVPEDKRGERHPIFGNLEEEVKYHENFPTIYHLRKYLADSPEKADLRLVYLALAHIIKFRGHFLIEGKLDTRNNDVQRLFQEFLAVYDNTFENSSLQEQNVQVEEILTDKISKSAKKDRVLKLFPNEKSNGRFAEFLKLIVGNQADFKKHFELEEKAPLQFSKDTYEEDLENLLAQIGDDYAELFLSAKKLYDSILLSGILTVTDVSTKAPLSASMIKRYNEHQSDLTQLKQFIRQKLSDKYNEVFSDVSKDGYAGYIDGKTNQEAFYKYLKGLLNKIEGSGYFLDKIEREDFLRKQRTFDNGSIPHQIHLQEMRAIIRRQAEFYPFLAENQDKIEKILTFRIPYYVGPLARGKSDFAWLSRKSADKITPWNFDEIVDKESSAEAFINRMTNYDLYLPNEKVLPKHSLLYEKFTVYNELTKVKYKTEQMGKTAFFDANMKQEIFDGVFKVYRKVTKDKLMDFLEKEFDEFRIVDLTGLDKAFNASYGTYHDLRKILKDKDFLDNSKNEKILEDIVLTLTLFEDREMIRKRLENYSDLLTKEQLKKLERRHYTGWGRLSAKLINGIRNKESRKTILDYLIDDGNSNRNFMQLINDDALSFKEEIAKAQVIGETDNLNQVVSDIAGSPAIKKGILQSLKIVDELVKIMGGHQPENIVVEMARENQFTNQGRRNSQQRLKGLTDSIKEFGSQILKEHPVDNSQLQNDRLFLYYLQNGRDMYTGEELDIDYLSQYDIDHIIPQAFIKDNSIDNRVLVSSKEARGKSDDVPSKDVVRKMKSFWSKLLSAKLITQRKFDNLTKAERGGLTDDDKAGFIKRQLVETRQITKHVARILDERFNTETDENNKKIRQVKIVTLKSNLVSNFRKEFELYKVREINDYHHAHDAYLNAVVGKALLKKYPKLEPEFVYGDYPKFNGYKFVSQIKEEENKATAKKFFYSNIMNFFKSDIKLADGQIVERPMIERNDETGEIIWDKTKHISTVKKVLSYPQVNIVKKVEEQTGGFSKESILPKGNSDKLIPRKTKWDTKKYGGFDSPIVAYSVLVIADIEKGKSKKLKTVKALVGITIMEKMTFEKNPVAFLERKGYQNIQEENIIKLPKYSLFELENGRKRLLASARELQKGNELVLPNHLVTLLYHAKNIHKIDEKPEDIPKHLEYVEKHRDEFKELLDVVSNFSKKYTLAEGNLEKIKELYAQNNSADIKELASSFINLLTFTALGAPAAFKFFDKNIDRKRYTSTTEILNATLIHQSITGLYETRIDLSKLGGD

SEQ ID NO: 218 - protein, 1368 aa, synthetic construct
MKKPYSIGLDIGTNSVGWAVITDEYKVPSKKFKVLGNTDRHSIKKNLLGALLFDSGETAEATRLKRTARRRYTRRKNRIRYLQEIFSSEMAKVDDSFFHRLEESFLVEEDKRHERHPIFGNIVDEVAYHEKYPTIYHLRKKLADSTQKADLRLIYLALAHMIKFRGHFLIEGDLNSDNSDVDKLFIQLVQTYNQLFEENPINESGVDAKAILSEKLSKSRRLENLIAQLPGEKKNGLFGNLIALSLGLTPNFKSNFKLAEDAKLQFSKDTYDEDLDNLLAQIGDQYADLFLAAKNLSDAILLSGILTVNDEITKAPLSASMIKRYDEHHQDLTLLKALVRQQLPEKYKEIFFDQTKNGYAGYIDGGASQEEFYKFIKPILEKMDGTEELLTKLNREDLLRKQRTFDNGSIPHQIHLGELHAILRRQEDFYPFLKENREKIEKILTFRIPYYVGPLARGNSRFAWMTRKSDETITPWNFEEVVDKEASAQAFIERMTNFDKNLPNEKVLPKHSLLYEYFTVYNELTKVKYVTEGMRKPEFLSGKQKQEIVDLLFKKNRKVTVKQLKDDYFKKIDCFDSVEISGVEDSFNASLGTYHDLLKIIKDKDFLDNEENEDILEDIVLTLTLFEDREMIEHRLSKYAHLFDKKVLKQLKRRRYTGWGRLSRKLINGIRDKQSGKTILDFLKSDGFANRNFMQLIHDDSLTFKEAIQKAQVSGKTDSLHEQIANLAGSPAIKKGILQTVKIVDELVKVMGRHNPENIVIEMARENQTTQKGQKNSRERMKRIEEGIKELGSQILKEHPVENTQLQNEKLYLYYLQNGRDMYVDQELDINRLSDYDVDHIVPQSFLKDDSIDNKVLTRSDKARGKSDNVPSEEVVKKMKNYWRQLLNAKLITQRKFDNLTKAERGGLSELDKAGFIKRQLVETRQITKHVAQILDSRMNTESDENDKLIREVKIITLKSKLVSDFRKDFQFYKVREINNYHHAHDAYLNAVVGTALIKKYPKLESEFVYGDYKVYDVRKMIAKSEQEIGKATAKYFFYSNIMNFFKTEITLANGEIRKRPLIETNEETGEIVWDKEKDFATVRKVLSMPQVNIVKKTEVQTGGFSKESILPKRNSDKLIARKKDWDTKKYGGFDSPTVAYSVLVIAKVEKGKSKKLKSVKELVGITIMERSSFEKDPVAFLEKKGYKNIQDDLIIKLPKYSLFELENGRKRMLASAGELQKGNELALPQHYVTFLYHASHYEKLKGRPEDNEKKLYYVEQHRDYFDEIFSQIEEFSERYILADANLSKVKSLYNNNRDSSIREQAENFIHLLTFTSLGAPAAFKFFDTTIDRKRYTSTTEVLDATLIHQSITGLYETRIDLSKLGGD

SEQ ID NO: 219 - protein, 1368 aa, synthetic construct
MDKKYSIGLDIGTNSVGWAVVTDDYKVPSKKFKVLGNTDRKSIKKNLLGALLFDSGETAEATRLKRTARRRYTRRKNRICYLQEIFSNEMAKVDDSFFHRLEESFLVEEDKRGERHPIFGNIVEEVAYHEKFPTIYHLRKHLADSTEKADLRLVYLALAHIIKFRGHFLIEGDLSSENTDVDKLFIQLVQTYNQLFEENPINASGVDAKAILSARLSKSRRLENLIAQLPGEKKNGLFGNLIALSLGLTPNFKSNFDLAEDAKLQLSKDTYDDDLDNLLAQIGDQYADLFLAAKNLSDAILLSDILRVSDESTKAPLSASMVKRYEEHHKDLTLLKDFIRKQLPEKYKEIFFDKSKNGYAGYIDGGASQEEFYKYLKKILEKIDGSEEFLDKIEREDFLRKQRTFDNGSIPHQIHLQEMHAIIRRQEEYYPFLKENQEKIEKILTFRIPYYVGPLARGNSRFAWLSRKSDETITPWNFDEVVDKEASAEAFIERMTNFDKNLPDEKVLPKHSLLYEKFTVYNELTKVKYVTEGGKKPKFFDANLKQEIVDLLFKKERKVTKKQLLDFLVKEFDEFRIVDISGVEDRFNASLGTYHDLLKILKDKDFLDNEENEEILEDIVLTLTLFEDREMIKQRLEKYADLFDKKQLKKLERRRYTGWGRLSAKLINGIRDKQTGKTILDYLIDDGFANRNFMQLIHDDSLSFKEEIAKAQVIGQGDSLHETIANLAGSPAIKKGILQSLKIVDELVKVMGRHEPENIVVEMARENQTTAKGQKNSRERMKRIEEGIKELGSQILKEHPVENTQLQNEKLYLYYLQNGRDMYVDQELDINRLSDYDVDHIVPQSFLKDDSIDNKVLTRSDKARGKSDNVPSEEVVKKMKNYWRQLLNAKLITQRKFDNLTKAERGGLTDDDKAGFIKRQLVETRQITKHVAQILDSRFNTEYDENGKLIRDVKIITLKSKLVSQFRKEFELYKVREINDYHHAHDAYLNAVVGTALIKKYPKLESEFVYGDYPKYNLRKLIKKSDRERGKATAKMFFYSNIMNFFKSDVKLADGDVRERPIIEVNEETGEIIWDKGKHIATVKKVLSMPQVNIVKKTEVQTGGFSKESILPKRDSDKLIARKKDWDTKKYGGFDSPTVAYSVLVVADVEKGKAKKLKTVKELVGITIMERSAFEKDPVAFLEDKGYQNIQKDNIIKLPKYSLFELENGRKRLLASAGELQKGNELALPNHLVTLLYHAKHIEKLDGKPEDEKEKLLYVEKHRDEFDEIFDQISEFSKRYILADANLEKIKELYEKNFEASIEELASSFINLLTFTALGAPAAFKFFGKDIDRKRYTSTKEILNATLIHQSITGLYETRIDLSKLGGD

SEQ ID NO: 220 - protein, 1368 aa, synthetic construct
MDKKYSIGLDIGTNSVGWAVITDEYKVPSKKFKVLGNTDRQSIKKNLIGALLFDSGETAEATRLKRTARRRYTRRKNRICYLQEIFSEEMAKVDDSFFHRLEESFLVEEDKKHERHPIFGNIVDEVAYHEKYPTIYHLRKKLVDSTDKADLRLIYLALAHMIKFRGHFLIEGDLNPDNSDVDKLFIQLVQTYNQTFEENPINASGVDAKAILSERLSKSRRLENLIAQLPNEKKNGLFGNLIALSLGLTPNFKSNFDLAEDAKLQLSKDTYDDDLDNLLGQIGDQYADLFLAAKNLSDAILLSDILRVNTEITKAPLSASMIKRYDEHHQDLTLLKALVRQQLPEKYKEIFFDKSKNGYAGYIDGGASQEEFYKFIKPILEKMDGTEELLVKLNREDLLRKQRTFDNGSIPHQIHLGELHAILRRQEDFYPFLKDNREKIEKILTFRIPYYVGPLARGNSRFAWMTRKSDETITPWNFEEVVDKGASAQSFIERMTNFDKNLPNEKVLPKHSLLYEYFTVYNELTKVKYVTEGMRKPAFLSGEQKKEIVDLLFKTNRKVTVKQLKEDYFKEIECFDSVEISGVEDRFNASLGTYHDLLKIIKDKDFLDNEENEDILEDIVLTLTLFEDREMIEKRLKTYANLFDKKVMKQLKRRRYTGWGRLSRKLINGIRDKQSGKTILDFLKSDGFANRNFMQLIHDDSLTFKEDIQKAQVSGQGDSLHEQIANLAGSPAIKKGILQTIKVVDELVKVMGRHKPENIVIEMARENQTTQKGQKNSRERMKRIEEGIKELGSQILKEHPVENTQLQNEKLYLYYLQNGRDMYTDQELDINRLSDYDVDHIVPQSFLKDDSIDNKVLTSSKKARGKSDNVPSEEVVKKMKSYWRQLLNAKLITQRKFDNLTKAERGGLSELDKAGFIKRQLVETRQITKHVAQILDSRMNTKYDENDKLIRDVKVITLKSKLVSDFRKDFQFYKVREINNYHHAHDAYLNAVVGTALIKKYPKLESEFVYGDYKVYDSRKMIAKSEQEIGKATAKYFFYSNIMNFFKSEITLANGTIRKRPVIETNEETGEIVWDKGRDFATVRKVLSMPQVNIVKKTEVQTGGFSKESILPKRNSDKLIARKKDWDPKKYGGFDSPTVAYSVLVVAKVEKGKTKKLKSVKELLGITIMERSSFEKNPVDFLEAKGYKEIQEDLIIKLPKYSLFELENGRKRLLASAGELQKGNELALPQKYVTFLYHASHYEKLKGKPEDEEKKQLFVEQHNHYFDEIVEQIEEFSERYILADKNLEKIKSLYNNHEDYSIREQAENIINLFTLTNLGAPAAFKYFDTTIDRKRYTSTKEILNATLIHQSITGLYETRIDLSQLGGD

SEQ ID NO: 221 - protein, 1368 aa, synthetic construct
MDKPYSIGLDIGTNSVGWAVVTDEYKVPSKKFKVLGNTDRKSIKKNLWGVLLFDSGETAEATRLKRTARRRYTRRKNRILYLQEIFAEEINKVDENFFHRLEESFLVEEDKRGERHPIFANIVEEVAYHEDYPTIYHLRKHLADTPEKADLRLVYLALAHIIKFRGHFLIEGKFDVENTDIQETFKEFLEIYDETVEESELEIENIDVESILTDKISKSRRKEEVLKLFPNQKKNSIFAEFLKLIVGLTPNFKSFFNLEEDAKLQFSKDTYEEDLEELLGQIGDEYAEVFVSAKRVYDSIVLSGILTVKDNSTKAKLSASMVQRYDEHHQDLTKLKKFIRKNFPDEYKDIFFDQSKDGYAGYIDGGAKQEDFYKYLKKLLNKIEGSEYFLEKIENEDFLRKQRTFDNGSIPHQVHLQEMKAIIKNQGEYYPFLKENQDKIQQILTFRIPYYVGPLARGNSRFAWLSRKSDETITPWNFDDIIDKEKSAEKFIERMTNFDKNLPDEKVLPKHSLLYEKFTVYNELTKVKYIDEQGKEKQFFDANLKQEIFNELFKKERKVTKKQLLDYLKKEFYELRIVDISGVEDRFNASLSTYHDLKKILGNEEFLDDPKNAEMLEEIIKTLTLFEDRKMIKKRLEKYSDILSKEQIKKLSRRRYTGWGRLSAKLLNGIRDKETNKTILDYLIEDDNSNRNFMQLIHDDNLSFKEEIEKAQVIDDTESLHEVIANLAGSPAIKKGILQSLKIVDEIVKVMGRYAPKNIVVEMARENQTTQKGQKNSRERMKRLQEAMKEFGKDLLKEYPTDNTKLQNDKLYLYYLQNGKDMYTGEALDIDNLSDYDVDHIVPQSFLKDDSIDNRVLVSSKEARGKSDDVPSIDIVRKMIGFWKKLLDAKLITQRKYDNLTKGERGELTELDKAGFIKRQLVETRQITKHVAQILDERFNAEVDDDGKLIRKTKIVTLKSKLTSQFRKEFGLYKVREINNYHHAHDAYLNAVVAKALIKVYPKLESEFVYGDYPVFDVKKEKRESKREIGKATQKKFFYSNLMNMFKSDVKLADDSVVEKDIVDFNDETGEILWDKDKHISTIKKVLSMPQVNIVKKTEVQTGGFSKESILPKRDSDKLIARKKDWNTEKYGGFDSPTVAYSVVVIADIEKGKAKKLKTIKEIIGITIMERSAFEQDEVAFLENKGYQNIQENNLVKLPKYSLYELENGRKRLLASAGELQKGNELALPNHYVELLYHAKRYEKIKRENDESEYSENYLQEHREEFNDLLDQVKEFAERYTLADANLEKIKKLFEENEEADLEELAKSFVNLLSFTAMGAPAAFKFFGKNIDRKRYTSIKELLNATIIHQSITGLYETRIDLSKLGED

SEQ ID NO: 222 - protein, 1368 aa, synthetic construct
MKKPYSIGLDIGTNSVGWAVVTDDYKVPSKKMKVLGNTDRSSIKKNLLGALLFDSGETAEATRLKRTARRRYTRRKNRILYLQEIFAEEMNKVDESFFHRLEDSFLVEEDKRGERHPIFGNIVEEVKYHEEFPTIYHLRKHLADSKEKADLRLVYLALAHIIKFRGHFLIEGDLDTRNTDIQELFKEFLKVYDNTFENSHLSEETADVEEILTDKLSKSAKKDKLLKLFPNEKSNGFFAEFLKLIVGNQADFKKHFSLSEKAKLQFSKDTYEEDLETLLGQIGDEYADVFVAAKKLYDSILLSGILTVTDLSTKAPLSASMVQRYEEHHEDLTKLKKFIRKKLPEKYKEFFFDTSKNGYAGYIDGGTKQEDFYKYLKKLLSKIEGSEYFLEKIEREDFLRKQRTFDNGSIPHQIHLQELRAIIRRQGEYYPFLKENQDKIEQILTFRIPYYVGPLARGNSRFAWASRKSDETITPWNFEEIIDKESSAEAFITRMTNNDLYLPEEKVLPKHSLLYEKFTVYNELTKVKYITEQMGETEFFDANMKQEIFDGVFKKYRKVTKKKLINFLEKEFDEFRIVDLSGVEKAFNASLGTYHDLLKILGDKEFLDDPANEKILEDIIQTLTLFEDREMIKKRLSKYRDLFTKAQLKKLERRHYTGWGRLSAKLINGIRDKETGKTILDYLIDDGRSNRNFMQLIHDDALSFKEEIAKAQVIGESESLHEVVAELAGSPAIKKGILQSLKIVDELVKVMGRYNPENIVVEMARENQTTAKGQRNSRERLKGLEDSMKELGSDILKEYPVDNSQLQNDRLYLYYLQNGKDMYTGEALDIDNLSQYDVDHIIPQSFIKDDSIDNRVLVSSAKARGKSDDVPSKEVVHKMKPFWKKLLDAKLISQRKYDNLTKAERGGLTDDDKAGFIKRQLVETRQITKHVAQILDERFNEEKDENNKLIRKVKIVTLKSKLVSQFRKEFELYKVREINDYHHAHDAYLNAVVAKALITKYPKLEPEFVYGDYPKYNSYKLVSYSNEERGKATSKMFFYSNLMNFFKKDVKLADGNVVERPDIEVNDETGEIAWDKTKHISTVKKVLSMPQVNIVKKTEVQTGGFSKESILPKRNSDKLIARKKKWDTKKYGGFDSPIVAYSVLVVADIKKGKKKKLKTVKEIVGITIMEKSTFEKDPIAFLEDKGYQNIREENIIKLPKYSLFELENGRKRLLASAGELQKGNELALPQHLVTLLYHAKRIEEFDEKEEDEPEHLNYVMKHRSEFKELFDQVSEFSERYILADKNLEKIEELYDQNESADIKELASSFINLLTFTALGAPADFKFFGGDIDRKRYTSTTEILNATLIHQSITGLYETRIDLSKLGED

SEQ ID NO: 223 - protein, 1368 aa, synthetic construct
MDKPYSIGLDIGTNSVGWAVVTDEYKVPSKKFKVLGNTDRHSIKKNLLGALLFDSGETAEATRLKRTARRRYTRRKNRIRYLQEIFAEEMAKVDDSFFHRLEESFLVEEDKRGERHPIFGNIVDEVAYHEEYPTIYHLRKHLADSDEKADLRLIYLALAHIIKFRGHFLIEGDLNAENSDVQKLFQALVETYDQTFEESPLSEETVDAEVILTAKVSKSRRLENLIKQFPNEKKNGLFGNLVALSLGLKPNFKTNFELSEDAKLQFSKDTYDEDLENLLGQIGDQYADLFAAAKNLSDAILLSGILTVNTEITKAPLSASMIKRYDEHHQDLTLLKAFIRQQLPEKYKEIFFDKSKNGYAGYIDGGASQEDFYKYIKPILSKMDGSEYFLDKINREDFLRKQRTFDNGSIPHQIHLQELHAILRRQEEYYPFLKENQEKIEKILTFRIPYYVGPLARGNSRFAWMKRKSDETITPWNFEEVVDKEASAQAFIERMTNNDKNLPNEKVLPKHSLLYEMFTVYNELTKVKYVTEGMRKPAFFSSEQKQEIVDLLFKKNRKVTKKKLLEYLFKKFDEFRSVDISGVEKAFNASLGTYHDLLKIIKDKEFLDNEENQDILEDIVLTLTLFEDREMIEQRLSKYADLFDKKVLKKLKRRRYTGWGRLSAKLINGIRDKQSGKTILDYLKDDGFANRNFMQLIHDDSLSFKEEIAKAQVIGKNDSLHEVIANLAGSPAIKKGILQSLKIVDELVKVMGRYNPENIVIEMARENQTTQKGQRNSRERLKRLEEGIKELGSNILKEHPVENTQLQNDKLYLYYLQNGKDMYTGEELDIDRLSDYDVDHIIPQSFIKDDSIDNRVLVSSAKARGKSDDVPSEEVVKKMKGFWHKLLKAKLISQRKFDNLTKAERGGLSELDKAGFIKRQLVETRQITKHVAQILDSRFNTKYDENDKLIRDVKIITLKSKLVSQFRKDFKFYKVREINDYHHAHDAYLNAVVGTALIKKYPKLESEFVYGDYPVYDSYKMIAKSEQEIGKATAKYFFYSNIMNFFKTDITLANGEIRKRPLIETNEETGEIVWDKEKDFATVRKVLSMPQVNIVKKTEVQTGGFSKESILPKRNSDKLIARKKDWDTKKYGGFDSPTVAYSVLVIADIEKGKTKKLKTVKELVGITIMERSSFEKNPILFLEDKGYQNIQKDNIIKLPKYSLFELENGRKRLLASAGELQKGNELALPQHYVTLLYHAKHYEKLKESPEDNEKHLEYVTKHRDEFDEILDQISEFSKRYILADKNLEKIKELYSKNREADISELAKSFINLLTFTALGAPAAFKFLGADIDRKRYTSTTEILDATLIHQSITGLYETRIDLSQLGGD

SEQ ID NO: 224 - protein, 1368 aa, synthetic construct
MDKKYSIGLDIGTNSVGWAVITDEYKVPSKKFKVLGNTDRHSIKKNLIGALLFDSGETAEATRLKRTARRRYTRRKNRICYLQEIFSNEMAKVDESFFHRLEESFLVEEDKKGERHPIFGNIVEEVAYHEKYPTIYHLRKHLADSTEKADLRLVYLALAHIIKFRGHFLIEGDLNIENTDVQKLFEQFVQVYDKTFEESHLEEETIDAKAILTEKLSKSRRLENLIAQFPGEKKNGLFGNLIALSLGLTPNFKANFQLSEDAKLQLSKDTYDEDLENLLGQIGDEYADLFVAAKNLYDAILLSGILTVNDLSTKAPLSASMIKRYDEHHQDLTLLKAFVREQLPEKYKEIFFDSTKNGYAGYIDGGASQEEFYKYIKKILSKIDGSEYFLDKIEREDFLRKQRTFDNGSIPHQIHLQELHAILRRQEAYYPFLKENQEKIEKILTFRIPYYVGPLARGNSRFAWASRKSDETITPWNFEEVVDKEASAEAFIERMTNFDKNLPEEKVLPKHSLLYEKFTVYNELTKVKYVTEGMGKAQFFDANQKQEIFDGLFKKERKVTKKKLLDFLDKEFDEFRIVDISGVEDAFNASLGTYHDLLKIIKDKDFLDDEENEDILEDIILTLTLFEDREMIEKRLSKYEDLFTKKVLKQLERRRYTGWGRLSKKLINGIRDKESGKTILDYLISDGHANRNFMQLIHDDSLSFKEEIKKAQVKGEVDSLHEHIANLAGSPAIKKGILQTVKVVDELVKVMGRHKPENIVIEMARENQTTQKGQKNSRERMKRIEEGIKELGSQILKEHPVENTQLQNEKLYLYYLQNGRDMYVDQELDINRLSDYDVDHIVPQSFLKDDSIDNKVLTRSDKARGKSDNVPSEEVVKKMKNYWRQLLNAKLITQRKFDNLTKAERGGLSELDKAGFIKRQLVETRQITKHVAQILDSRMNTKYDENDKLIREVKVITLKSKLVSDFRKDFQFYKVREINNYHHAHDAYLNAVVGTALIKKYPKLESEFVYGDYKVYDVRKMIAKSEQEIGKATAKYFFYSNIMNFFKTEITLANGEIRKRPLIETNGETGEIVWDKGRDFATVRKVLSMPQVNIVKKTEVQTGGFSKESILPKRDSDKLIARKKDWDTKKYGGFDSPTVAYSVLVVADIEKGKKKKLKTVKELVGITIMERSSFEKDPVAFLEKKGYQNIQEDLIIKLPKYSLFELENGRKRLLASAGELQKGNELALPQKYVTLLYHAKHYEKLKEKPENIEEHLEYVEQHRDEFDEIFEQIEEFSKRYVLADKNLEKILELYAKNENFSIEELAKSFINLLTFTALGAPAAFKFFGETIDRKRYTSTKECLNATLIHQSITGLYETRIDLSKLGGD

SEQ ID NO: 225 - protein, 1368 aa, synthetic construct
MDKKYSIGLDIGTNSVGWAVITDEYKVPSKKFKVLGNTDRHSIKKNLIGALLFDSGETAEATRLKRTARRRYTRRKNRICYLQEIFSNEMAKVDDSFFHRLEESFLVEEDKKHERHPIFGNIVDEVAYHEKYPTIYHLRKKLVDSTDKADLRLIYLALAHMIKFRGHFLIEGDLNPDNSDVDKLFIQLVQTYNQLFEENPINASGVDAKAILSARLSKSRRLENLIAQLPGEKKNGLFGNLIALSLGLTPNFKSNFDLAEDAKLQLSKDTYDDDLDNLLAQIGDQYADLFLAAKNLSDAILLSDILRVNTEITKAPLSASMIKRYDEHHQDLTLLKALVRQQLPEKYKEIFFDQSKNGYAGYIDGGASQEEFYKFIKPILEKMDGTEELLVKLNREDLLRKQRTFDNGSIPHQIHLGELHAILRRQEDFYPFLKDNREKIEKILTFRIPYYVGPLARGNSRFAWMTRKSEETITPWNFEEVVDKGASAQSFIERMTNFDKNLPNEKVLPKHSLLYEYFTVYNELTKVKYVTEGMRKPAFLSGEQKKAIVDLLFKTNRKVTVKQLKEDYFKKIECFDSVEISGVEDRFNASLGTYHDLLKIIKDKDFLDNEENEDILEDIVLTLTLFEDREMIEERLKTYAHLFDDKVMKQLKRRRYTGWGRLSRKLINGIRDKQSGKTILDFLKSDGFANRNFMQLIHDDSLTFKEDIQKAQVSGQGDSLHEHIANLAGSPAIKKGILQTVKVVDELVKVMGRHKPENIVIEMARENQTTQKGQKNSRERMKRIEEGIKELGSQILKEHPVENTQLQNEKLYLYYLQNGRDMYVDQELDINRLSDYDVDHIVPQSFLKDDSIDNKVLTRSDKARGKSDNVPSEEVVKKMKNYWRQLLNAKLITQRKFDNLTKAERGGLSELDKAGFIKRQLVETRQITKHVAQILDSRMNTKYDENDKLIREVKVITLKSKLVSDFRKDFQFYKVREINNYHHAHDAYLNAVVGTALIKKYPKLESEFVYGDYKVYDVRKMIAKSEQEIGKATAKYFFYSNIMNFFKTEITLANGEIRKRPLIETNGETGEIVWDKGRDFATVRKVLSMPQVNIVKKTEVQTGGFSKESILPKRDSDKLIARKKDWDTKKYGGFDSPTVAYSVLVVAKIEKGKAKKLKTVKELVGITIMERSAFEKDPVAFLEDKGYQNIQKDLFIKLPKYSLFELENGRKRLLASAGELQKGNELALPQHYVTLLYHAKNYEKLKGSPEDEKEHLIYIEEHREEFDEILDQIIEFSERYILKDANLEKIKELYEKNFEASIEELATSFINLLTFTALGAPAAFKFFGTDIDRKRYTSTKEILNSTLIHQSITGLYETRIDLSKLGGD

SEQ ID NO: 226 - protein, 1368 aa, synthetic construct
MDKKYSIGLDIGTNSVGWAVITDEYKVPSKKFKVLGNTDRHSIKKNLLGALLFDSGETAEATRLKRTARRRYTRRKNRIRYLQEIFAEEMSKVDDSFFHRLEESFLVEEDKRGERHPIFGNIVDEVAYHEKYPTIYHLRKHLADSTEKADLRLIYLALAHIIKFRGHFLIEGKLNSENTDVQKLFIQFVQTYDQLFEESHLSEETVDAEAILTEKLSKSRRLENLIKQFPGEKKNGLFGNLLALSLGLTPNFKSNFDLSEDAKLQFSKDTYDEDLENLLAQIGDQYADLFVAAKNLSDAILLSGILTVNTEITKAPLSASMIKRYDEHHQDLTLLKKFVRQQLPEKYKEIFFDQSKNGYAGYIDGGASQEDFYKYIKPILSKLDGSEYFLDKIEREDFLRKQRTFDNGSIPHQIHLQELHAILRRQEEFYPFLKENQEKIEKILTFRIPYYVGPLARGNSRFAWMSRKSDETITPWNFEEVVDKEASAEAFIERMTNVDKNLPEEKVLPKHSLLYEKFTVYNELTKVKYITEGMRKPAFLSAEQKEEIVDLLFKKNRKVTVKKLKEFLFKKIECFDSVEISGVEDRFNASLGTYHDLLKIIKDKAFLDNEENEEILEDIVLTLTLFEDREMIEQRLSKYADLFDKKVLKKLKRRRYTGWGRLSAKLINGIRDKQSGKTILDFLIDDGFANRNFMQLIHDDSLTFKEEIQKAQVIGETDSLHEVIANLAGSPAIKKGILQSLKIVDELVKVMGRHAPENIVIEMARENQTTQKGQKNSRERLKRLEEGIKELGSQILKEHPVDNTQLQNDKLYLYYLQNGKDMYTGEELDIDRLSDYDVDHIIPQSFIKDDSIDNRVLTSSSKARGKSDNVPSIEVVKKMKSFWRQLLNAKLISQRKFDNLTKAERGGLSELDKAGFIKRQLVETRQITKHVAQILDSRFNTKYDENDKLIREVKIITLKSKLVSDFRKDFELYKVREINDYHHAHDAYLNAVVGTALIKKYPKLESEFVYGDYKVYDSRKMIAKSEQEIGKATAKYFFYSNIMNFFKSEVTLANGEIRKRPLIETNEETGEIVWDKEKDFATVKKVLSMPQVNIVKKTEVQTGGFSKESILPKRNSDKLIARKKDWDTKKYGGFDSPTVAYSVLVIAKVEKGKTKKLKTVKELVGITIMERSAFEKDPVAFLEKKGYQNIRKDNIIKLPKYSLFELENGRKRLLASAGELQKGNELALPNKYVTLLYHAKHYEKLKESPEDNEKKLEYVKQHRDEFDEILDQISEFSERYILADKNLEKIQELYKQNREADIEELAESFINLFTFTALGAPAAFKFFDTTIDRKRYTSTTEILNATLIHQSITGLYETRIDLSQLGGD

SEQ ID NO: 227 - protein, 1368 aa, synthetic construct
MDKSYSIGLDIGTNSVGWAVITDEYKVPSKKFKVLGNTDRQSIKKNLLGALLFDSGETAEATRLKRTARRRYTRRKNRIRYLQEIFAEEMSKVDDSFFHRLEESFLVEEDKKGERHPIFGNIVDEVAYHEKYPTIYHLRKKLADTTDKADLRLIYLALAHIIKFRGHFLIEGDLNPENSDVAKLFIQLVQTYNQLFEENPIDTSGVDAKAILSAKLSKSRRLENLIALFPGEKKNGLFGNLIALSLGLTPNFKSNFDLTEDAKLQLSKDTYDEDLDNLLGQIGDQYADLFLAAKNLSDAILLSDILTVNDESTKAPLSASMIKRYDEHHQDLTLLKALVRKQLPEKYKEIFFDESKNGYAGYIDGGASQEEFYKYIKPILEKMDGAEELLAKLNREDLLRKQRTFDNGSIPHQIHLGELHAILRRQEDFYPFLKENREKIEKILTFRIPYYVGPLARGNSRFAWMTRKSEETITPWNFEEVVDKEASAQAFIERMTNFDKNLPNEKVLPKHSLLYEYFTVYNELTKVKYVTEGMRKPEFLSGEQKEEIVDLLFKTNRKVTVKQLKEDYFKEIECFDSVEISGVEDRFNASLGTYHDLLKIIKDKDFLDNEENEKILEDIILTLTLFEDREMIEQRLEKYAHLFDKKVMKQLKRRRYTGWGRLSRKLINGIRDKQSGKTILDFLKSDGFANRNFMQLIHDDSLTFKEEIQKAQVVGQGESLHEQIANLAGSPAIKKGILQTIKIVDELVKVMGRHKPENIVIEMARENQTTQKGQKNSRERMKRIEEGIKELGSQILKEHPVENTQLQNEKLYLYYLQNGRDMYVDQELDINRLSDYDVDHIVPQSFLKDDSIDNKVLTRSDKARGKSDNVPSEEVVKKMKNYWRQLLNAKLITQRKFDNLTKAERGGLSELDKAGFIKRQLVETRQITKHVAQILDSRMNTEYDENDKLIREVKIITLKSKLVSDFRKDFQFYKVREINDYHHAHDAYLNAVVGTALIKKYPKLESEFVYGDYKVYDVRKMIRKSEKEIGKATAKYFFYSNIMNFFKTEVTLANGEIRKRPLIETNEETGEIVWDKEKDFATVRKVLSMPQVNIVKKTEVQTGGFSKESILPKRDSDKLIARKKDWDPKKYGGFDSPTVAYSVLVVAKIEKGKSKKLKSVKELVGITIMERSSFEKDPVAFLEAKGYKNIQKDLIIKLPKYSLFELENGRKRLLASAGELQKGNELALPNKYVRFLYLAHHYEKLKGKPEDNENKLEYVEQHRKYFDEILEQIKEFSERYILADKNLDKIKSTYAKNRDKPINELAENFIHLFTLTALGAPAAFKFFDTTIDRKRYTSTSEVLNATLIHQSITGLYETRIDLSQLGGD

SEQ ID NO: 228 - protein, 1368 aa, synthetic construct
MDKKYSIGLDIGTNSVGWAVITDEYKVPSKKFKVLGNTDRKSIKKNLLGALLFDSGETAEATRLKRTARRRYTRRKNRILYLQEIFAEEMAKVDDSFFHRLEESFLVEEDKRFERHPIFGNIVDEVAYHEKYPTIYHLRKKLADSDEKADLRLVYLALAHIIKFRGHFLIEGDLNAENTDVQKLFKQLVQTYNQTFEESHLEEEGVDAEAILTEKLSKSRRLENLIAQFPGEKKNGLFGNLIALSLGLTPNFKSNFDLSEDAKLQFSKDTYDEDLENLLGQIGDEYADLFLAAKNLYDAILLSGILTVDDESTKAPLSASMVKRYDEHHQDLTLLKAFIRKQLPEKYKEIFFDQSKNGYAGYIDGGASQEEFYKYIKKILEKIDGSEEFLDKIEREDFLRKQRTFDNGSIPHQIHLQELHAILRRQEKYYPFLKENQEKIEKILTFRIPYYVGPLARGNSRFAWMSRKSDETITPWNFEEVVDKEASAEKFIERMTNFDKNLPNEKVLPKHSLLYEKFTVYNELTKVKYVTEGGRKPEFFDAEQKQEIFDLLFKKNRKVTKKQLKEYLFKEFDEFDSVEISGVEDRFNASLGTYHDLLKIIKDKDFLDNEENEKILEDIILTLTLFEDREMIKERLEKYADLFDKKQLKKLKRRRYTGWGRLSAKLINGIRDKQSGKTILDYLIDDGFANRNFMQLIHDDSLTFKEEIEKAQVIGDGDSLHELIANLAGSPAIKKGILQSLKIVDELVKVMGRHAPENIVIEMARENQTTQKGQKNSRERMKRLEEAIKELGSKILKEHPVENTQLQNDKLYLYYLQNGKDMYTGEELDIDRLSDYDVDHIVPQSFLKDDSIDNRVLTSSKKARGKSDDVPSEEVVKKMKNFWRKLLEAKLITQRKFDNLTKAERGGLTELDKAGFIKRQLVETRQITKHVAQILDSRFNTKYDENDKLIRDVKIITLKSKLVSQFRKDFELYKVREINNYHHAHDAYLNAVVGTALIKKYPKLESEFVYGDYKVYDVRKMIAKSEQEIGKATAKYFFYSNIMNFFKTEVKLADGEIRKRPLIETNEETGEIVWDKEKDFATVRKVLSMPQVNIVKKTEVQTGGFSKESILPKRDSDKLIARKKDWDTKKYGGFDSPTVAYSVLVIAKVEKGKAKKLKTVKELVGITIMERSSFEKNPIAFLEDKGYKNVKKDLIIKLPKYSLFELENGRKRLLASAGELQKGNELALPQKYVTLLYHAKHYEKLKGSPEDNEQHQIYVEQHKEEFDEIFDQIIEFSKRYILADANLEKIKSLYEKNRDASIEELAESFINLLTFTALGAPAAFKFFGTTIDRKRYTSTKEILNATLIHQSITGLYETRIDLSKLGGD

SEQ ID NO: 229 - protein, 1368 aa, synthetic construct
MDKKYSIGLDIGTNSVGWAVITDEYKVPSKKFKVLGNTDRKSIKKNLIGALLFDSGETAEATRLKRTARRRYTRRKNRICYLQEIFSNEMAKVDDSFFHRLEESFLVEEDKRNERHPIFGNIVEEVAYHEKYPTIYHLRKKLADSDEKADLRLVYLALAHIIKFRGHFLIEGDLDSENSDVDKLFIQLVQTYNQLFEENPINASGVDAKAILSARLSKSRRLENLIAQLPGEKKNGLFGNLIALSLGLTPNFKSNFDLAEDAKLQLSKDTYDDDLDNLLAQIGDQYADLFLAAKNLSDAILLSDILRVSDETTKAPLSASMVKRYDEHHQDLTLLKQFIREQLPEKYKEIFFDQSKNGYAGYIDGGASQEEFYKYLKKILEKIDGSEEFLDKIEREDFLRKQRTFDNGSIPHQIHLQELHAIIRRQEKYYPFLKENQEKIEKILTFRIPYYVGPLARGNSRFAWLSRKSDETITPWNFEEVVDKEKSAQAFIERMTNFDKNLPDEKVLPKHSLLYEKFTVYNELTKVKYVTEGMRKPEFFSAEQKQEIVDLLFKKYRKVTKKQLKEYLFKEFDCFDIVEISGVEDRFNASLGTYHDLLKILKDKEFLDNEENEEILEDIILTLTLFEDREMIKKRLEKYADLFDKKQLKKLERRRYTGWGRLSAKLINGIRDKQTGKTILDYLIADGFANRNFMQLIHDDSLTFKEEIEKAQVIGKGDSLHELIANLAGSPAIKKGILQSLKIVDELVKVMGRYAPENIVVEMARENQTTQKGQKNSRERMKRIEEGIKELGSQILKEHPVENTQLQNEKLYLYYLQNGRDMYVDQELDINRLSDYDVDHIVPQSFLKDDSIDNKVLTRSDKARGKSDNVPSEEVVKKMKNYWRQLLNAKLITQRKFDNLTKAERGGLSELDKAGFIKRQLVETRQITKHVAQILDSRFNTKYDENGKLIRDVKIITLKSKLVSDFRKDFGLYKVREINNYHHAHDAYLNAVVGTALIKKYPKLESEFVYGDYKVYDVRKMIAKSEKEIGKATAKYFFYSNIMNFFKTDVTLANGEIRKRPLIEVNEETGEIVWDKEKDIATVRKVLSMPQVNIVKKTEVQTGGFSKESILPKRDSDKLIARKKDWDTKKYGGFDSPTVAYSVLVIADVEKGKAKKLKTVKELVGITIMERSAFEKDPVAFLEDKGYKNIQKDLLIKLPKYSLFELENGRKRLLASAGELQKGNELALPQHYVTLLYHAKHYEKLKGKPEDNEKKQLYVEEHKHYFDEILDQIEEFAKRYILADANLEKIKELYEKNRDASIEELAENFIHLLTFTALGAPAAFKFFGKTIDRKRYTSTKEILNATLIHQSITGLYETRIDLSKLGGD

SEQ ID NO: 230 - protein, 1368 aa, synthetic construct
MDKKYSIGLDIGTNSVGWAVITDEYKVPSKKFKVLGNTDRHSIKKNLIGALLFDSGETAEATRLKRTARRRYTRRKNRICYLQEIFSNEMAKVDDSFFHRLEESFLVEEDKKHERHPIFGNIVDEVAYHEKYPTIYHLRKKLVDSTDKADLRLIYLALAHMIKFRGHFLIEGDLNPDNSDVDKLFIQLVQTYNQLFEENPINASGVDAKAILSARLSKSRRLENLIAQLPGEKKNGLFGNLIALSLGLTPNFKSNFDLAEDAKLQLSKDTYDDDLDNLLAQIGDQYADLFLAAKNLSDAILLSDILRVNTEITKAPLSASMIKRYDEHHQDLTLLKQLVRKQLPEKYKEIFFDQSKNGYAGYIDGGASQEEFYKYIKPILEKMDGTEELLAKLEREDLLRKQRTFDNGSIPHQIHLGELHAILRRQEKYYPFLKENREKIEKILTFRIPYYVGPLARGNSRFAWMTRKSDETITPWNFEEVVDKGASAEKFIERMTNFDKNLPEEKVLPKHSLLYEYFTVYNELTKVKYVTEGMRKPEFLSGEQKKEIVDLLFKKYRKVTVKQLKEYYFKEFECFDIVEISGVEDRFNASLGTYHDLLKIIKDKDFLDNEKNEEILEDIVLTLTLFEDREMIKERLEKYADLFDKKVMKQLKRRRYTGWGRLSRKLINGIRDKQSGKTILDFLKADGFANRNFMQLIHDDSLTFKEEIEKAQVGGQGDSLHEHIANLAGSPAIKKGILQTVKVVDELVKVMGRHKPENIVIEMARENQTTQKGQKNSRERMKRIEEGIKELGSQILKEHPVENTQLQNEKLYLYYLQNGRDMYVDQELDINRLSDYDVDHIVPQSFLKDDSIDNKVLTRSDKARGKSDNVPSEEVVKKMKNYWRQLLNAKLITQRKFDNLTKAERGGLSELDKAGFIKRQLVETRQITKHVAQILDSRMNTKYDENDKLIREVKVITLKSKLVSDFRKDFQFYKVREINNYHHAHDAYLNAVVGTALIKKYPKLESEFVYGDYKVYDVRKMIAKSEQEIGKATAKYFFYSNIMNFFKTEITLANGEIRKRPLIETNGETGEIVWDKGRDFATVRKVLSMPQVNIVKKTEVQTGGFSKESILPKRDSDKLIARKKDWDPKKYGGFDSPTVAYSVLVVAKIEKGKAKKLKTVKELLGITIMERSAFEKNPVAFLEDKGYQEVKKELIIKLPKYSLFELENGRKRMLASAGELQKGNELALPSKYVNFLYLASNYEKLKGKPEDNEQKQIYVEQHKEYLDEIIDQISEFSKRVILADANLEKVKSAYEKHREKSIEEQAENIIHLFTLTDLGAPAAFKYFDTTIDRKRYTSTKEVLNATLIHQSITGLYETRIDLSQLGGD

SEQ ID NO: 231 - protein, 1368 aa, synthetic construct
MDKPYSIGLDIGTNSVGWAVITDEYKVPSKKFKVLGNTDRHSIKKNLLGALLFDSGETAEATRLKRTARRRYTRRKNRIRYLQEIFAEEMNKVDDSFFHRLEESFLVEEDKEEERHPIFGNIVDEVAYHEKYPTIYHLRKHLADSTEKADLRLIYLALAHIIKFRGHFLIEGDLNSENTDVQKLFIQFVQVYDNLFEESHLEEETVDAEAILTEKLSKSRRLENLIKQFPNEKKNGLFGNLLALSLGLTPNFKSNFDLAEDAKLQFSKDTYEEDLENLLAQIGDEYADLFLAAKNLSDAILLSGILTVNTEITKAPLSASMIKRYDEHHQDLTLLKKFVRQQLPEKYKEIFFDESKNGYAGYIDGGASQEEFYKYIKPILSKLDGTEYFLAKIEREDFLRKQRTFDNGSIPHQIHLQELHAILRRQEDFYPFLKENQEKIEKILTFRIPYYVGPLARGNSRFAWLSRKSDETITPWNFEEVVDKEASAEAFIERMTNFDKNLPNEKVLPKHSLLYEKFTVYNELTKVKYVTEGMRKPAFFSAEQKKEIVDLLFKKNRKVTVKKLKEHLFKEFECFDIVEISGVEDAFNASLGTYHDLLKIIKDKDFLDNEENEDILEDIVLTLTLFEDREMIEKRLSKYAHLFDKKVLKKLKRRRYTGWGRLSAKLINGIRDKQTGKTILDYLIDDGFANRNFMQLIHDDSLTFKEEIKKAQVIGQGDSLHETIANLAGSPAIKKGILQSLKIVDELVKVMGRHNPENIVIEMARENQTTQKGQKNSRERLKRLEEAIKKLGSQILKEHPVENTQLQNDKLYLYYLQNGKDMYTGEELDIDRLSDYDVDHIIPQSFIKDDSIDNRVLTSSAKARGKSDDVPSEEVVKKMKAYWRQLLNAKLISQRKFDNLTKAERGGLSELDKAGFIKRQLVETRQITKHVAQILDSRFNTKYDENDKLIREVKIITLKSKLVSDFRKDFGFYKVREINDYHHAHDAYLNAVVGTALIKKYPKLESEFVYGDYKVYNSYKMIAKSEQEIGKATAKYFFYSNIMNFFKTEITLANGEIRKRPLIETNEETGEIVWDKEKDFATVRKVLSMPQVNIVKKTEVQTGGFSKESILPKRNSDKLIARKKDWDTKKYGGFDSPTVAYSVLVVADVEKGKAKKLKTVKELVGITIMERSAFEKDPIAFLEDKGYQNIQKENIIKLPKYSLFELENGRKRLLASAGELQKGNELALPNKYVTLLYHAKNYEKLKGSPEDNEKHLEYVEQHRYEFDEILDQISEFSERYILADKNLEKIEELYAENEDKSIEELAESFINLFTFTALGAPAAFKFFDKTIDRKRYTSTTEILNATLIHQSITGLYETRIDLSQLGGD

SEQ ID NO: 232 - protein, 1368 aa, synthetic construct
MDKPYSIGLDIGTNSVGWAVITDEYKVPSKKFKVLGNTDRHSIKKNLIGALLFDSGETAEATRLKRTARRRYTRRKNRILYLQEIFAEEMNKVDDSFFHRLEESFLVEEDKRYERHPIFGNIVDEVAYHENYPTIYHLRKKLADSTEKADLRLIYLALAHIIKFRGHFLIEGDLDSENTDVQKLFKALVQTYNNTFEESHLEEATVDAKSILTDKLSKSRRLENLIAQFPNEKKNGLFGNLIALALGLTPNFKSNFDLAEDAKLQFSKDTYDEDLENLLTQIGDQYADLFLAAKNLYDAILLSGILTVNTEITKAPLSASMIKRYDEHHQDLTLLKKLVREQLPEKYKEIFFDDTKNGYAGYIDGGASQEEFYKYIKNILSKLDGTEYFLAKIEREDFLRKQRTFDNGSIPHQIHLEELHAILRRQEEFYPFLKENREKIEKILTFRIPYYVGPLARGNSRFAWMSRKSDETITPWNFEEVVDKEASAEAFIERMTNNDKNLPNEKVLPKHSLLYEKFTVYNELTKVKYITEGMRKPAFLSAEQKKDIVDLLFKKDRKVTVKKLKEFLFKKIECLDSVEISGVEDKFNASLGTYHDLLKIIKDKEFLDNEENEEILEDIVLTLTLFEDREMIKQRLAKYAHLFDKKVLKKLKRRRYTGWGRLSRKLINGIRDKQTGKTILDYLKDDGFANRNFMQLIHDDSLTFKEEIKKAQVTGQGDSLHEVIANLAGSPAIKKGILQSLKIVDELVKVMGRHNPENIVIEMARENQTTQKGQKNSRERLKRLEEAIKKLGSKILKEHPVENTQLQNDKLYLYYLQNGRDMYTGEELDIDRLSDYDVDHIIPQSFIKDDSIDNRVLTSSAEARGKSDNVPSIEVVKKMKSYWSKLLNSKLISQRKFDNLTKAERGGLSELDKAGFIKRQLVETRQITKHVAQILDSRFNTKYDENDKLIRKVKIITLKSKLVSDFRKDFGFYKVREINDYHHAHDAYLNAVVGTALIKKYPKLESEFVYGDYKVYNSRKMIAKSEQEIGKATAKYFFYSNIMNFFKSEITLANGEIRKRPLIETNEETGEIAWNKVKHFATVRKVLSMPQVNIVKKTEVQTGGFSKESILPKRNSDKLIARKKDWDTKKYGGFDSPTVAYSVLVVADREKGKAKKLKTVKELVGITIMERSTFEKDPIAFLEGKGYQNIQKELIIKLPKYSLFELENGRKRLLASAGELQKGNELALPQKYVTLLYHASHYEKLKESPEDNEKHLEYVEQHREEFDEIFDQISEFSKRYILADKNLEKILSLYDKNRQSSIEELAESFINLFTFTALGAPAAFKFFNKTIDRKRYTSTSEILNATLIHQSITGLYETRIDLSQLGGD

SEQ ID NO: 233 - protein, 1368 aa, synthetic construct
MKKPYSIGLDIGTNSVGWAVVTDDYKVPAKKMKVLGNTDKSHIKKNLLGALLFDSGNTAEDRRLKRTARRRYTRRRNRILYLQEIFSEEMGKVDDSFFHRLEDSFLVPEDKRGERHPIFGNLEEEVKYHENFPTIYHLRKYLADNPEKADLRLVYLALAHIIKFRGHFLIEGKFDTRNNDVQRLFQEFLAVYDNTFENSSLQEQNVQAEEILTDKISKSAKKDRVLKLFPNEKSNGRFAEFLKLIVGNQADFKKHFELEEKAPLQFSKDTYEEDLEVLLAQIGDEYAELFLSAKKLYDSILLSGILTVTDVSTKAPLSASMIQRYNEHQEDLTQLKQFIRQKLPDKYNEVFSDVSKNGYAGYIDGKTNQEAFYKYLKGLLNKIEGSGYFLDKIEREDFLRKQRTFDNGSIPHQIHLQEMRAIIRRQAEFYPFLAENQDKIEKILTFRIPYYVGPLARGKSDFAWLSRKSAEKITPWNFDEIVDKESSAEAFINRMTNYDLYLPNQKVLPKHSLLYEKFTVYNELTKVKYKTEQMGKTAFFDANMKQEIFDGVFKVYRKVTKDKLMDFLEKEFDEFRIVDLTGLDKAFNASYGTYHDLLKILKDKDFLDNSKNEKILEDIVLTLTLFEDREMIRKRLENYSDLLTKEQLKKLERRHYTGWGRLSAKLIHGIRNKESRKTILDYLIDDGNSNRNFMQLINDDALSFKEEIAKAQVIGETDNLNQVVSDIAGSPAIKKGILQSLKIVDELVKIMGGHQPENIVVEMARENQFTNQGRRNSQQRLKGLTDSIKEFGSQILKEHPVDNSQLQNDRLFLYYLQNGRDMYTGEELDIDYLSQYDIDHIIPQAFIKDNSIDNRVLVSSKEARGKSDDVPSKDVVRKMKSYWSKLLSAKLITQRKFDNLTKAERGGLTDDDKAGFIKRQLVETRQITKHVARILDERFNTETDENNKKIRQVKIVTLKSNLVSNFRKEFELYKVREINDYHHAHDAYLNAVVGKALLGKYPQLEPEFVYGDYPKFNSHKFVAKDAKEEKKATAKKFFYSNIMNFFKSDDKLADGQIVERPMVERNDENGEIIWDKTKHISTVKKVLSYPQVNIVKKVEEQTGGFSKESILPKGNSDKLIPRKTKWDTKKYGGFDSPIVAYSVLVIADIEKGKSKKLKTVKALVGITIMEKMTFEKDPVAFLERKGYRNIQEENIIKLPKYSLFELENGRKRLLASARELQKGNEIVLPNHLVTLLYHAKNIHKVDEKAEDIPKHLDYVDKHRAEFKELLDVVSNFSKKYTLAEGNLEKIKELYAQNNSADIKELASSFINLLTFTALGAPATFKFFDKNIDRKRYTSTTEILNATLIHQSITGLYETRIDLSKLGGD

SEQ ID NO: 234 - protein, 1368 aa, synthetic construct
MKKPYSIGLDIGTNSVGWAVVTDEYKVPSKKFKVLGNTDRQSIKKNLLGALLFDSGETAEATRLKRTARRRYTRRKNRILYLQEIFAEEMNKVDESFFHRLEESFLVEEDKRGERHPIFGNIVEEVAYHEKYPTIYHLRKHLADSTEKADLRLVYLALAHIIKFRGHFLIEGDLNSENTDVQKLFKDFVEVYDKTFEESHLSEETVDAESILTEKVSKSRRLENLIKQFPNEKKNGLFGNLLALSLGLQPNFKTNFQLSEDAKLQFSKDTYEEDLENLLGQIGDEYADLFTAAKNLYDAILLSGILTVNDESTKAPLSASMVKRYDEHHQDLTKLKAFIRQNLPEKYKEIFFDKSKNGYAGYIDGGAKQEEFYKYLKNILSKIDGSEYFLDKIEREDFLRKQRTFDNGSIPHQIHLQELKAILRRQGEYYPFLKENQEKIEKILTFRIPYYVGPLARGNSRFAWASRKSDETITPWNFDEVVDKEKSAEAFIERMTNNDKNLPEEKVLPKHSLLYEKFTVYNELTKVKYVTEQMGKAEFFDANMKQEIFDGVFKKYRKVTKKKLLDFLDKEFDEFRIVDISGVEKAFNASLGTYHDLKKILKDKSFLDNPENEKILEDIILTLTLFEDREMIRKRLEKYADLFTKKQLKKLERRRYTGWGRLSAKLINGIRDKQSGKTILDYLIDDGYANRNFMQLIHDDSLSFKEEIKKAQVIGESDSLHEVIADLAGSPAIKKGILQSLKIVDELVKVMGRYNPENIVIEMARENQTTQKGQRNSRERLKRLEESIKELGSDILKEHPVENTQLQNDKLYLYYLQNGKDMYTGEELDIDNLSDYDVDHIIPQSFIKDDSIDNRVLTSSAKARGKSDDVPSEEVVRKMKSFWSKLLKAGLISQRKFDNLTKAERGGLTELDKAGFIKRQLVETRQITKHVAQILDERFNTERDENNKLIRDVKIITLKSKLVSNFRKEFEFYKVREINDYHHAHDAYLNAVVGKALIKKYPKLESEFVYGDYPVYNSYKMIAKSEQEIGKATAKYFFYSNIMNFFKTEITLANGEIRKRPLIETNGETGEIVWDKGRDFATVRKVLSMPQVNIVKKTEVQTGGFSKESILPKRNSDKLIARKKDWDPKKYGGFDSPTVAYSVLVVAKVEKGKSKKLKSVKELLGITIMERSSFEKNPIDFLEAKGYKEVKKDLIIKLPKYSLFELENGRKRMLASAGELQKGNELALPSKYVNFLYLASHYEKLKGSPEDNEQKQLFVEQHKHYLDEIIEQISEFSKRVILADANLDKVLSAYNKHRDKPIREQAENIIHLFTLTNLGAPAAFKYFDTTIDRKRYTSTKEVLDATLIHQSITGLYETRIDLSQLGGD

SEQ ID NO: 235 - protein, 1368 aa, synthetic construct
MDKSYSIGLDIGTNSVGWAVITDEYKVPSKKFKVLGNTDRKSIKKNLIGALLFDSGETAEATRLKRTARRRYTRRKNRICYLQEIFSNEMAKVDDSFFHRLEESFLVEEDKRFERHPIFGNIVEEVAYHEKYPTIYHLRKKLVDSDEKADLRLIYLALAHMIKFRGHFLIEGDLNSDNSDVDKLFIQLVQTYNQLFEENPINASGVDAKAILSARLSKSRRLENLIAQLPGEKKNGLFGNLIALSLGLTPNFKSNFDLAEDAKLQLSKDTYDDDLDNLLAQIGDQYADLFLAAKNLSDAILLSDILRVNTEITKAPLSASMIKRYDEHHQDLTLLKALVRQQLPEKYKEIFFDQSKNGYAGYIDGGASQEEFYKFIKPILEKMDGTEELLVKLNREDLLRKQRTFDNGSIPHQIHLGELHAILRRQEDFYPFLKDNREKIEKILTFRIPYYVGPLARGNSRFAWMTRKSEETITPWNFEEVVDKGASAQSFIERMTNFDKNLPNEKVLPKHSLLYEYFTVYNELTKVKYVTEGMRKPAFLSGEQKKAIVDLLFKTNRKVTVKQLKEDYFKKIECFDSVEISGVEDRFNASLGTYHDLLKIIKDKDFLDNEENEDILEDIVLTLTLFEDREMIEERLKTYAHLFDDKVMKQLKRRRYTGWGRLSRKLINGIRDKQSGKTILDFLKSDGFANRNFMQLIHDDSLTFKEDIQKAQVSGQGESLHEHIANLAGSPAIKKGILQTVKVVDELVKVMGRHKPKNIVIEMARENQTTQKGQKNSRERMKRIEEGIKELGSQILKEHPVENTQLQNEKLYLYYLQNGRDMYVDQELDINRLSDYDVDHIVPQSFLKDDSIDNKVLTRSDKARGKSDNVPSEEVVKKMKNYWRQLLNAKLITQRKFDNLTKAERGGLSELDKAGFIKRQLVETRQITKHVAQILDSRMNTEYDENDKLIRDVKVITLKSKLVSDFRKDFGFYKVREINNYHHAHDAYLNAVVGTALIKKYPKLESEFVYGDYPVYDVRKMIAKSSQEIGKATAKYFFYSNIMNFFKSEITLANGTIRKRPLIESNEETGEIVWDKEKDFATVKKVLSMPQVNIVKKTEVQTGGFSKESILPKRDSDKLIARKKDWDPRKYGGFDSPTVAYSVLVVAKIEKGKTKKLKTVKELLGITIMERSAFEKDPVAFLEDKGYKDVKKNLIIKLPKYSLFELENGRKRMLASAGELQKGNELALPSHYVNFLYLASRYEKLKGKEEDEKQKQIYVEKHLEYLKEIIDQISEFSERVILADANLEKVKKAYEEHSEKSIEEQAENIIHLFTLTALGAPAAFKYFNVDIDRKRYTSTKEVLNATLIHQSITGLYETRIDLSKLGGD

SEQ ID NO: 236 - protein, 1368 aa, synthetic construct
MDKKYSIGLDIGTNSVGWAVITDEYKVPSKKFKVLGNTDRQSIKKNLIGALLFDSGETAEATRLKRTARRRYTRRKNRICYLQEIFSEEMSKVDDSFFHRLEESFLVEEDKRHERHPIFGNIVDEVAYHEKYPTIYHLRKKLVDSTDKADLRLIYLALAHMIKFRGHFLIEGDLNPDNSDVDKLFIQLVQTYNQTFEENPISAETVDAEAILTERLSKSRRLENLIAQLPNEKKNGLFGNLIALSLGLTPNFKSNFELSEDAKLQLSKDTYDEDLENLLAQIGDQYADLFTAAKNLYDAILLSDILRVNTLITKAPLSASMIKRYDEHHQDLTLLKALVRQQLPEKYKEIFFDESKNGYAGYIDGGASQEEFYKFIKPILSKMDGTEYLLVKLEREDLLRKQRTFDNGSIPHQIHLQELHAILRRQEDFYPFLKDNREKIEKILTFRIPYYVGPLARGNSRFAWMTRKSDETITPWNFEEVVDEGASAQSFIERMTNFDKNLPNEKVLPKHSLLYEYFTVYNELTKVKYVTEGMRKPAFLSGEQKKEIVDLLFKTNRKVTVKQLKEDLFNEIDCFDSVDISGVEDRFNASLGTYHDLLKIIKDKDFLDNEENEDILEDIVLTLTLFEDREMIEKRLKTYANLFDKKVMKQLKRRRYTGWGRLSRKLINGIRDKQSGKTILDFLKSDGFANRNFMQLIHDDSLTFKEDIQKAQVSGQTDSLHEQIANLAGSPAIKKGILQTLKVVDELVKVMGRYKPENIVIEMARENQTTQKGQKNSRERMKRIEEGIKELGSKILKEHPVENTQLQNEKLYLYYLQNGRDMYTDQELDINRLSDYDVDHIVPQSFLKDDSIDNRVLTSSKKARGKSDDVPSEEVVKKMKSYWRQLLNAGLITQRKFDNLTKAERGGLSELDKAGFIKRQLVETRQITKHVAQILDSRMNTKYDENSKLIRDVKVITLKSKLVSDFRKDFQFYKVREINNYHHAHDAYLNAVVGTALIKKYPKLESEFVYGDYKVYDSYRMVAKSDKEIGKATAKYFFYSNIMNFFKSDVKLADGRIRERPQIETNEETGEIAWDKGRDFATVRKVLSMPQVNIVKKTEVQTGGFSKESILPKRNSDKLIARKKDWDPKKYGGFDSPTVAYSVLVVADVEKGKAKKLKSVKELLGITIMERSSFEKNPVDFLEAKGYQNIQEDKIIKLPKYSLFELENGRKRLLASAGELQKGNELALPQKYVTFLYHAKHYEKLKGKPEDLEKHQLFVEQHRHYFDEILEQIIEFSERYILADKNLEKIKELFAEHEEASIREQASNIINLFTFTNLGAPAAFKYFDTDIDRKRYTSTTEILNATLIHQSITGLYETRIDLSQLGGD

SEQ ID NO: 237 - protein, 1368 aa, synthetic construct
MDKKYSIGLDIGTNSVGWAVITDEYKVPSKKFKVLGNTDRHSIKKNLIGALLFDSGETAEATRLKRTARRRYTRRKNRICYLQEIFSNEMAKVDDSFFHRLEESFLVEEDKKGERHPIFGNIVDEVAYHEKYPTIYHLRKKLADSTEKADLRLIYLALAHIIKFRGHFLIEGDLNSENTDVQKLFKQLVQTYDQTFEESHLNEETVDAKSILTEKLSKSRRLENLIKQFPNEKKNGLFGNLIALSLGLQPNFKSNFDLSEDAKLQFSKDTYDEDLENLLGQIGDQYADLFVAAKNLYDAILLSGILTVNDESTKAPLSASMIKRYDEHHQDLTLLKAFVRQQLPEKYKEIFFDETKNGYAGYIDGGASQEEFYKYIKPILEKMDGSEYFLEKIEREDFLRKQRTFDNGSIPHQIHLQELHAILRRQEEYYPFLKENQEKIEKILTFRIPYYVGPLARGNSRFAWMTRKSDETITPWNFDEVVDKEASAQAFIERMTNFDKNLPEEKVLPKHSLLYEKFTVYNELTKVKYVTEQMGKPQFFDANLKQEIFDGLFKKNRKVTKKKLLDFLDKEFDEFRIVDISGVEDAFNASLGTYHDLLKIIKDKEFLDNEENEDILEDIVLTLTLFEDREMIEKRLSKYADLFDKKVLKQLERRRYTGWGRLSAKLINGIRDKQSGKTILDYLIDDGFANRNFMQLIHDDSLTFKEEIKKAQVIGQGDSLHEHIANLAGSPAIKKGILQTVKVVDELVKVMGRHKPENIVIEMARENQTTQKGQRNSRERLKRLEEAIKELGSKILKEHPVENTQLQNDKLYLYYLQNGKDMYTGEELDIDRLSDYDVDHIIPQSFIKDDSIDNRVLTSSAKARGKSDNVPSEEVVRKMKSFWSKLLNAKLISQRKFDNLTKAERGGLSELDKAGFIKRQLVETRQITKHVAQILDSRMNTKYDENDKLIREVKVITLKSKLVSDFRKDFQFYKVREINNYHHAHDAYLNAVVGTALIKKYPKLESEFVYGDYKVYDVRKMIAKSEQEIGKATAKYFFYSNIMNFFKTEITLANGEIRKRPLIETNGETGEIVWDKGRDFATVRKVLSMPQVNIVKKTEVQTGGFSKESILPKRDSDKLIARKKDWDTKKYGGFDSPTVAYSVLVVAKIEKGKAKKLKTVKELVGITIMERSAFEKNPVAFLEDKGYQNIQEDLIIKLPKYSLFELENGRKRLLASAGELQKGNELALPQKYVTLLYHAKHYEKLKGKPEDEEKHLEYVEQHRSEFDEILEQISEFSERYILADKNLEKILELYEQFENKSIEELASSFINLLTLTALGAPAAFKFFGETIDRKRYTSTKEILNATLIHQSITGLYETRIDLSKLGGD

SEQ ID NO: 238 - protein, 1368 aa, synthetic construct
MKKKYSIGLDIGTNSVGWAVITDEYKVPSKKFKVLGNTDRQSIKKNLLGALLFDSGETAEATRLKRTARRRYTRRKNRIRYLQEIFSEEMSKVDDSFFQRLEESFLVEEDKRHERHPIFGNIVEEVAYHEKYPTIYHLRKKLADSTQKADLRLIYLALAHMIKFRGHFLIEGDLNPENSDVQKLFIQLVQTYNQLFEENPINESGVDAKAILSAKLSKSRRLENLIAQFPGEKKNGLFGNLIALSLGLTPNFKSNFDLAEDAKLQLSKDTYDEDLDNLLAQIGDQYADLFAAAKNLSDAILLSGILTVNDEITKAPLSASMIKRYDEHHQDLTLLKNLVREQLPEKYKEIFFDDSKNGYAGYIDGGASQEEFYKFIKPILEKMDGTEYLLAKINREDFLRKQRTFDNGSIPHQIHLGELHAILRRQEEFYPFLKENREKIEKILTFRIPYYVGPLARGNSRFAWMTRKSEETITPWNFEEVVDKGASAQAFIERMTNFDKNLPTEKVLPKHSLLYEYFTVYNELTKVKYVTEGMRKPEFLSSNQKKEIVDLLFKKSRKVTVKQLKEDYFKKIECFDSVEISGVEDRFNASLGTYHDLLKIIKDKDFLDNEENEEILEDIVLTLTLFEDREMIEERLKKYANLFDKKVLKQLKRRRYTGWGRLSRKLINGIKDKQSGKTILDFLKSDGFANRNFMQLIHDDSLTFKEEIQKAQVSGQGESLHEVIANLAGSPAIKKGILQSIKIVDEIVKVMGRHKPENIVIEMARENQTTQKGQKNSRERMKRIEEGIKELGSQILKEHPVENTQLQNEKLYLYYLQNGRDMYVDQELDINRLSDYDVDHIVPQSFLKDDSIDNKVLTRSDKARGKSDNVPSEEVVKKMKNYWRQLLNAKLITQRKFDNLTKAERGGLSELDKAGFIKRQLVETRQITKHVAQILDSRFNTKRDENDKLIREVKIITLKSKLVSDFRKDFQFYKVREINNYHHAHDAYLNAVVGTALIKKYPKLESEFVYGDYKVYDVRKKIAKSEQEIGKATAKYFFYSNIMNFFKSEITLANGEIRKRPLIETNEETGEIVWNKEKDFATVKKVLSMPQVNIVKKTEVQTGGFSKESILPKRNSDKLIARKKDWDTKKYGGFDSPTVAYSVLVVAKVEKGKAKKLKTVKELVGITIMERSSFEKDPVAFLEAKGYKEIQKDLIIKLPKYSLFELENGRKRLLASAGELQKGNELALPQKYVTFLYLAKHYEKLKGKPEDLEKNLEYVEEHRDYFKEILEQIKEFSERYILADANLEKIKELYNEHEDYEISELAENFIHLFTLTSLGAPAAFKFFDTTIDRKRYTSTKEILNATLIHQSITGLYETRIDLSQLGGD

SEQ ID NO: 239 - protein, 1368 aa, synthetic construct
MDKKYSIGLDIGTNSVGWAVITDEYKVPSKKFKVLGNTDRHSIKKNLIGALLFDSGETAEATRLKRTARRRYTRRKNRICYLQEIFSNEMAKVDDSFFHRLEESFLVEEDKKDERHPIFGNIVDEVAYHEKYPTIYHLRKHLADSTEKADLRLVYLALAHIIKFRGHFLIEGDLNSENTDVQKLFKQLVQTYNRTFEESPLSEETVDAEAILTEKLSKSRKLENLIAQFPNEKKNGLFGNLIALSLGLQPNFKSNFKLSEDAKLQFSKDTYDEDLENLLGQIGDEYADLFLAAKNLYDAILLSGILTVNDESTKAPLSASMIKRYDEHHQDLTLLKKFVREQLPEKYKEIFFDETKNGYAGYIDGGASQEEFYKYIKPLLEKVDGAEYFLEKIEREDFLRKQRTFDNGSIPHQIHLGELHAILRRQEEFYPFLKENQEKIEKILTFRIPYYVGPLARGNSRFAWMSRKSDETITPWNFEEVVDKEASAEAFIERMTNFDKNLPEEKVLPKHSLLYEKFTVYNELTKVKYVTEGMGKPEFFSANQKQEIFDGLFKKNRKVTKKKLKEFLFKEFEEFRIVDISGVEDAFNASLGTYHDLLKIIKDKDFLDNEENEDILEDIILTLTLFEDREMIEKRLQKYADLFDKKQLKKLERRRYTGWGRLSKKLINGIRDKQSGKTILDFLIDDGFANRNFMQLIHDDSLSFKEEIKKAQVIGQGDSLHEHIANLAGSPAIKKGILQTVKVVDELVKVMGRHKPENIVIEMARENQTTQKGQKNSRERMKRIEEGIKELGSQILKEHPVENTQLQNEKLYLYYLQNGRDMYVDQELDINRLSDYDVDHIVPQSFLKDDSIDNKVLTRSDKARGKSDNVPSEEVVKKMKNYWRQLLNAKLITQRKFDNLTKAERGGLSELDKAGFIKRQLVETRQITKHVAQILDSRMNTKYDENDKLIREVKVITLKSKLVSDFRKDFQFYKVREINNYHHAHDAYLNAVVGTALIKKYPKLESEFVYGDYKVYDVRKMIAKSEQEIGKATAKYFFYSNIMNFFKTEITLANGEIRKRPLIETNGETGEIVWDKGRDFATVRKVLSMPQVNIVKKTEVQTGGFSKESILPKRDSDKLIARKKDWDTKKYGGFDSPTVAYSVLVVADIEKGKAKKLKTVKELVGITIMERSRFEKNPIAFLEDKGYQNIQEDKIIKLPKYSLFELENGRKRLLASAGELQKGNELALPQKYVTLLYHAKNYEKLKEKPEDIEKHLEYVEKHRDEFKEILSQIIEFSKRYILADKNLEKIKELFNQNENSSISELASSFINLLTFTSLGAPAAFKFFGSTIDRKRYTSTKEILNATLIHQSITGLYETRIDLSKLGGD

SEQ ID NO: 240 - protein, 1368 aa, synthetic construct
MDKPYSIGLDIGTNSVGWAVVTDEYKVPSKKFKVLGNTDRHSIKKNLLGALLFDSGETAEATRLKRTARRRYTRRKNRIRYLQEIFAEEMNKVDDSFFHRLEESFLVEEDKRNERHPIFGNIVEEVAYHEKYPTIYHLRKHLADSTEKADLRLIYLALAHIIKFRGHFLIEGDLDSENTDVQKLFSALVQVYNQLQEESPLSEETVDAEAILTAKISKSRRLENLIALFPGEKKNGLFGNLIALSLGLTPNFKSNFELSEDAKLQFSKDTYDEDLENLLAQIGDQYADLFLAAKNLYDAILLSGILTVKTEITKAPLSASMVKRYDEHHQDLTLLKDFIRQQLPEKYKEIFFDDSKNGYAGYIDGGAKQEEFYKYIKPILEKLDGSEDFLDKIEREDFLRKQRTFDNGSIPHQIHLEELHAILRRQEEFYPFLKENQEKIEKILTFRIPYYVGPLARGNSRFAWMSRKSDETITPWNFEEVVDKEASAQLFIERMTNFDKNLPNEKVLPKHSLLYEMFTVYNELTKVKYVTEGMRKPAFFSSEQKKEIVDLLFKKYRKVTVKQLKNFLFKEFECFDIVEISGVEDRFNASLGTYHDLLKIIKDKDFLDNEENEDILEDIVLTLTLFEDREMIEERLEKYADIFDKNVLKKLKRRRYTGWGRLSGKLINGIRDKQSGKTILDYLIDDGFANRNFMQLIHDDSLTFKEEIAKAQVIGDTDSLHETIANLAGSPAIKKGILQSLKIVDELVKVMGRHKPENIVIEMARENQTTQKGQKNSRERLKRLEEAIKELGSKILKEHPVENTQLQNDKLYLYYLQNGRDMYTGEELDIDRLSDYDVDHIIPQSFIKDDSIDNKVLTSSAKARGKSDNVPSIEVVKKMKPYWQQLLDAKLISQRKFDNLTKAERGGLSELDKAGFIKRQLVETRQITKHVAQILDSRFNTKYDENDKLIRDVKIITLKSKLVSDFRKDFGFYKVREINDYHHAHDAYLNAVVGTALIKKYPKLESEFVYGDYKVYNSRKMIAKSEQEIGKATAKYFFYSNIMNFFKKDITLANGEIRKRPLIETNEETGEIVWDKEKDFATVKKVLSMPQVNIVKKTEVQTGGFSKESILPKRNSDKLIARKKDWDTTKYGGFDSPTVAYSVLVIAEIEKGKAKKLKTVKELVGITIMERSSFEKNPIAFLEAKGYKNIRKDLIIKLPKYSLFELENGRKRLLASAGELQKGNELALPQKYVTLLYHASHYEKLKESPEDNPPKFEYVVQHKHEFDEILDQIEEFSERYILADKNLEKINELYEENRDASIEELAESFINLLTFTALGAPAAFKFFGQTIDRKRYTSTTEVLNATLIHQSITGLYETRIDLSQLGGD

SEQ ID NO: 241 - protein, 1368 aa, synthetic construct
MKKKYSIGLDIGTNSVGWAVITDEYKVPSKKFKVLGNTDRHSIKKNLLGALLFDSGETAEATRLKRTARRRYTRRKNRICYLQEIFSEEMSKVDDSFFHRLEESFLVEEDKKGERHPIFGNIVDEVAYHEKYPTIYHLRKKLADSPEKADLRLIYLALAHMIKFRGHFLIEGDLNPENTDVDKLFIQLVQTYNQLFEENAIDASGVDAKDILSAKLSKSRRLENLIAQFPGEKKNGLFGNLIALSLGLTPNFKSNFDLAEDAKLQLSKDTYDEDLDNLLAQIGDQYADLFLAAKNLSDAILLSGILTVNDESTKAPLSASMIKRYDEHHQDLTLLKALVREQLPEKYKEIFFDESKNGYAGYIDGGASQEEFYKYIKPILEKMDGTEELLAKLNREDFLRKQRTFDNGSIPHQIHLGELHAILRRQEDFYPFLKENREKIEKILTFRIPYYVGPLARGNSRFAWMTRKSEETITPWNFEEVVDKGASAQAFIERMTNFDKNLPTEKVLPKHSLLYEYFTVYNELTKVKYVTEGMRKPEFFSGNQKEAIVDLLFKTNRKVTVKQLKEDYFKKIDCFDIVEISGVEDRFNASLGTYHDLLKIIKDKDFLDNEENEDILEDIVLTLTLFEDREMIEQRLKKYAHLFDKKVLKQLKRRRYTGWGRLSRKLINGIRDKQSGKTILDFLKADGFANRNFMQLIHDDSLTFKEEIQKAQVSGQTDSLHETIANLAGSPAIKKGILQSVKIVDELVKVMGRHKPENIVIEMARENQTTQKGQKNSRERMKRIEEGIKELGSQILKEHPVENTQLQNEKLYLYYLQNGRDMYVDQELDINRLSDYDVDHIVPQSFLKDDSIDNKVLTRSDKARGKSDNVPSEEVVKKMKNYWRQLLNAKLITQRKFDNLTKAERGGLSELDKAGFIKRQLVETRQITKHVAQILDSRMNTERDENDKLIREVKIITLKSKLVSDFRKDFQFYKVREINDYHHAHDAYLNAVVGTALIKKYPKLESEFVYGDYKVYDVRKMISKSEQEIGKATAKYFFYSNIMNFFKTEITLANGEIRKRPLIETNEETGEIVWDKGKDFATVRKVLSMPQVNIVKKTEVQTGGFSKESILPKRNSDKLIARKKDWDTKKYGGFDSPTVAYSVLVIAKVEKGKAKKLKSVKELVGITIMERSSFEKDPVAFLEDKGYKNVQKDLIIKLPKYSLFELENGRKRLLASAGELQKGNELALPSKYVTLLYHAKKYEKLKEKEEDNEKKQEYVEQHRYEFDEIFEQISEFSKRYILADKNLDKILELFSNFRDSSISELAENFIHLFTFTSLGAPAAFKFFDKTIDRKRYTSTKEILDATLIHQSITGLYETRIDLSQLGGD

SEQ ID NO: 242 - protein, 1368 aa, synthetic construct
MKKKYSIGLDIGTNSVGWAVITDEYKVPSKKFKVLGNTDRQSIKKNLIGALLFDSGETAEATRLKRTARRRYTRRKNRIRYLQEIFAEEMAKVDDSFFHRLEESFLVEEDKKHERHPIFGNIVDEVAYHEKYPTIYHLRKKLVDSTEKADLRLIYLALAHMIKFRGHFLIEGDLNSDNSDVQKLFIQLVQTYNQLFEENPINESGVDAKAILSARLSKSRRLENLIAQFPNEKKNGLFGNLIALSLGLTPNFKSNFDLAEDAKLQLSKDTYDDDLDNLLAQIGDQYADLFLAAKNLSDAILLSDILRVNTEITKAPLSASMIKRYDEHHQDLTLLKALVRQQLPEKYKEIFFDKSKNGYAGYIDGGASQEEFYKFIKPILEKMDGTEELLAKLNREDLLRKQRTFDNGSIPHQIHLGELHAILRRQEEFYPFLKENREKIEKILTFRIPYYVGPLARGNSRFAWMTRKSEETITPWNFEEVVDKGASAQSFIERMTNFDKNLPNEKVLPKHSLLYEYFTVYNELTKVKYVTEGMGKPEFLSGEQKKEIVDLLFKKNRKVTVKQLKEDYFKEIECFDSVEISGVEDRFNASLGTYHDLLKIIKDKDFLDNEENEDILEDIVLTLTLFEDREMIEERLKKYANLFDKKVMKQLKRRRYTGWGRLSRKLINGIRDKQSGKTILDFLKSDGFANRNFMQLIHDDSLTFKEAIKKAQVSGQGESLHEQIANLAGSPAIKKGILQTVKVVDELVKVMGRHKPENIVIEMARENQTTQKGQKNSRERMKRIEEGIKELGSQILKEHPVENTQLQNEKLYLYYLQNGRDMYTGQELDINRLSDYDVDHIVPQSFLKDDSIDNKVLTRSEKARGKSDNVPSEEVVKKMKNYWRQLLNAKLITQRKFDNLTKAERGGLSELDKAGFIKRQLVETRQITKHVAQILDSRMNTKRDENDKLIRDVKVITLKSKLVSDFRKDFQFYKVREINNYHHAHDAYLNAVVGTALIKKYPKLESEFVYGDYKVYDVRKMIAKSEQEIGKATAKYFFYSNIMNFFKTEIKLANGEIRKRPVIETNEETGEIVWDKERDFATVRKVLSMPQVNIVKKTEVQTGGFSKESILPKRESDKLIARKKDWDPKKYGGFDSPTVAYSVLVVAKVEKGKTKKLKTVKELLGITIMERSSFEKDPVDFLEDKGYKEVKKDLIIKLPKYSLFELENGRKRMLASAGELQKGNELALPSKYVNFLYLASHYEKLKGSPEDEEQKRLYVEQHKDYLDEIIDQISEFSERVILADKNLEKVLSAYNEFRDKSINEQAENIIHLFTLTNLGAPAAFKYFDTTIDRKRYTSTKEVLNATLIHQSITGLYETRIDLSQLGGD

SEQ ID NO: 243 - protein, 1368 aa, synthetic construct
MDKKYSIGLDIGTNSVGWAVVTDDYKVPSKKFKVLGNTDRKSIKKNLLGALLFDSGETAEATRLKRTARRRYTRRKNRICYLQEIFSNEMAKVDESFFHRLEESFLVEEDKRGERHPIFGNIVEEVAYHEKFPTIYHLRKKLADSPEKADLRLVYLALAHIIKFRGHFLIEGDLKSENTDVDKLFIQLVQTYNQLFEENPINASGVDAKAILSARLSKSRRLENLIAQLPGEKKNGLFGNLIALSLGLTPNFKSNFDLAEDAKLQLSKDTYDDDLDNLLAQIGDQYADLFLAAKNLSDAILLSDILRVSDESTKAPLSASMVKRYEEHHKDLTLLKQFIREQLPEKYKEIFFDASKNGYAGYIDGGASQEEFYKYLKKILEKIDGSEEFLDKIEREDFLRKQRTFDNGSIPHQIHLQELHAILRRQEEYYPFLKENKEKIEQILTFRIPYYVGPLARGNSRFAWLSRKSDETITPWNFDEVVDKEASAEAFIERMTNFDKNLPNEKVLPKHSLLYEKFTVYNELTKVKYVTEGGKKPEFFDANQKQEIFDLLFKKYRKVTKKQLKDFLFKEFDEFRIVDISGVEDRFNASLGTYHDLLKIIKDKDFLDNEENEEILEDIILTLTLFEDREMIKKRLEKYADLFDKKQLKKLERRRYTGWGRLSAKLINGIRDKQTGKTILDYLIDDGFANRNFMQLIHDDNLSFKEEIAKAQVIGQTESLHETIANLAGSPAIKKGILQSLKIVDELVKVMGRYEPENIVVEMARENQTTAKGQKNSRERMKRIEEGIKELGSQILKEHPVENTQLQNEKLYLYYLQNGRDMYVDQELDINRLSDYDVDHIVPQSFLKDDSIDNKVLTRSDKARGKSDNVPSEEVVKKMKNYWRQLLNAKLITQRKFDNLTKAERGGLTEDDKAGFIKRQLVETRQITKHVAQILDSRFNTEYDDNGKLIRDVKIITLKSKLVSQFRKDFELYKVREINDYHHAHDAYLNAVVGTALIKKYPKLESEFVYGDYPKYNLRKMIAKSRKEIGKATAKMFFYSNIMNFFKTDIKLADGTVRERPLIEVNEETGEIVWDKEKHIATVKKVLSMPQVNIVKKTEVQTGGFSKESILPKRDSDKLIARKKDWDTSKYGGFDSPTVAYSVLVIADVEKGKAKKLKTVKELVGITIMERSAFEKDPIAFLEDKGYQNIQKDNLIKLPKYSLFELENGRKRLLASAGELQKGNELALPNHLVTLLYHAKHIEKLKGSPEDNEESLNYVEEHREEFDEILDQISEFSKRYILADANLEKLKELYEKNKEASIEELASSFINLLTFTALGAPAAFKFFGKTIDRKRYTSTKEILNATLIHQSITGLYETRIDLSKLGGD

SEQ ID NO: 244 - protein, 1368 aa, synthetic construct
MDKPYSIGLDIGTNSVGWAVVTDEYKVPSKKFKVLGNTDRKSIKKNLLGALLFDSGETAEATRLKRTARRRYTRRKNRILYLQEIFAEEMAKVDDNFFHRLEESFLVEEDKRGERHPIFGNIVEEVAYHEKYPTIYHLRKHLADSPEKADLRLVYLALAHIIKFRGHFLIEGDLDAENTDVQELFQELLEVYDRTFEESHLQEEKVDAEEILTEKISKSRRLENLLALFPGEKKNGLFGELLKLIVGLTPNFKSNFGLEEDAKLQFSKDTYDEDLEELLGQIGDEYADLFVAAKKLYDAILLSGILTVKDSSTKAPLSASMVQRYDEHHQDLTLLKKFIRKNLPEKYKEIFFDQSKNGYAGYIDGGASQEDFYKYLKKLLEKIDGSEYFLDKIEREDFLRKQRTFDNGSIPHQIHLQELHAIIRRQEKYYPFLKENQEKIEKILTFRIPYYVGPLARGNSRFAWLSRKSDETITPWNFDEVVDKEASAEAFIERMTNFDKNLPDEKVLPKHSLLYEKFTVYNELTKVKYVTEGGKKPEFFDANMKQEIFDGVFKKYRKVTKKQLLDFLEKEFDEFRIVEISGVEDRFNASLGTYHDLKKILGDKDFLDNPDNEEILEDIILTLTLFEDREMIKKRLEKYEDLLDKEQIKKLERRRYTGWGRLSAKLINGIRDKQTGKTILDYLIDDGYANRNFMQLIHDDSLSFKEEIAKAQVIGETESLHEVIANLAGSPAIKKGILQSLKIVDELVKVMGRHEPENIVVEMARENQTTQKGQKNSRERMKRLEESIKELGSEILKEHPVENTKLQNDKLYLYYLQNGRDMYTGEPLDIDNLSDYDVDHIVPQSFLKDDSIDNRVLVSSAKARGKSDDVPSEEVVRKMKSFWKKLLDAKLITQRKYDNLTKAERGGLTELDKAGFIKRQLVETRQITKHVAQILDERFNTEYDENGKLIRKVKIVTLKSKLVSQFRKEFELYKVREINNYHHAHDAYLNAVVGKALIKKYPKLESEFVYGDYPVYDVYKFVAKSDREIGKATAKMFFYSNIMNFFKSDVKLADGEIVERPDIEVNEETGEIAWDKDKHIATVKKVLSMPQVNIVKKTEVQTGGFSKESILPKRDSDKLIARKKDWDTKKYGGFDSPTVAYSVLVVADIEKGKAKKLKTVKELVGITIMERSAFEKDPVAFLESKGYQNIQKENIIKLPKYSLFELENGRKRLLASAGELQKGNELALPNHYVTLLYHAKHYEKLKGKPEDIEKHLIYVEEHRDEFDELLDQISEFSKRYILADANLEKIKKLYEKNKEASIEELASSFINLLTFTALGAPAAFKFFGKNIDRKRYTSTKEILNATLIHQSITGLYETRIDLSKLGGD

SEQ ID NO: 245 - protein, 1368 aa, synthetic construct
MKKPYSIGLDIGTNSVGWAVVTDDYKVPSKKMKVLGNTDRSSIKKNLLGALLFDSGETAEATRLKRTARRRYTRRKNRILYLQEIFAEEMNKVDDSFFHRLEDSFLVEEDKRGERHPIFGNIVEEVKYHEEFPTIYHLRKELADSPEKADLRLVYLALAHIIKFRGHFLIEGDLDTENTDVQQLFQEFLEVYDKTFEDSHLSEQNVQVEEILTDKISKSAKKERVLKLFPNEKSNGFFAEFLKLIVGNQADFKKHFNLEEKAKLQFSKDTYEEDLETLLGQIGDEYADVFVAAKKLYDSILLSGILTVTDVSTKAPLSASMVQRYEEHHEDLTKLKQFIRKKLPEKYKEFFFDTSKNGYAGYIDGGTSQEEFYKYLKKLLNKIAGSEYFLEKIEREDFLRKQRTFDNGSIPHQIHLQELKAIIRRQAEYYPFLAENQDKIEKILTFRIPYYVGPLARGNSRFAWASRKSDETITPWNFDEIIDKEKSAEAFINRMTNNDLYLPEEKVLPKHSLLYEKFTVYNELTKVKYITEQMGETKFFDANMKQEIFDGVFKKYRKVTKKKLLNFLDKEFDEFRIVDLSGVEKAFNASLGTYHDLKKILGDKEFLDDPDNEDILEDIIQTLTLFEDREMIRKRLSKYSDLFTKEQLKKLERRHYTGWGRLSAKLINGIRDKETRKTILDYLIDDGRSNRNFMQLIHDDGLSFKEEIAKAQVIGETDSLHQVVADLAGSPAIKKGILQSLKIVDELVKVMGRYNPENIVVEMARENQTTNKGQRNSRERLKGLTDAIKNLGSKILKEYPVDNQQLQNDRLYLYYLQNGKDMYTGEELDIDNLSQYDVDHIIPQSFIKDDSIDNRVLVSSAKARGKSDDVPSIEVVRKMKSFWSKLLDAKLISQRKFDNLTKAERGGLTEDDKAGFIKRQLVETRQITKHVAQILDERFNTEKDENGKLIRKVKIVTLKSKLVSNFRKEFELYKVREINDYHHAHDAYLNAVVAKALIKKYPKLEPEFVYGDYPKYNSYKLVGETKNERGKATAKMFFYSNIMNFFKSDVKLADGTEVERPMIEVNEETGEIIWDKKKHISIVKKVLSMPQVNIVKKTEVQTGGFSKESILPKRNSDKLIARKKKWDTKKYGGFDSPIVAYSVLVIADIEKGKAQKLKTVKELVGITIMERSRFEKDPVAFLENKGYQNIREENIIKLPKYSLFELENGRKRLLASAGELQKGNELALPNHLVTLLYHAKNIEKLDEKEEEKPKHKNYVEKHRSEFKELLDQVSEFSKRYILADKNLEKIEELYAQNEEASIEELASSFINLLTFTALGAPADFKFFGKNIDRKRYTSTTEILNATLIHQSITGLYETRIDLSKLGED

SEQ ID NO: 246 - protein, 1368 aa, synthetic construct
MDKPYSIGLDIGTNSVGWAVVTDEYKVPSKKFKVLGNTDRHSIKKNLLGALLFDSGETAEATRLKRTARRRYTRRKNRIRYLQEIFAEEMNKVDDSFFHRLEESFLVEEDKRGERHPIFGNIVEEVAYHEEYPTIYHLRKKLADSTEKADLRLVYLALAHIIKFRGHFLIEGDLNSENTDVQKLFKEFVQTYDNTFEESHLQEETVDAKSILTAKISKSRRLENLIKQFPGEKKNGLFGNLIALSLGLQPNFKTNFELSEDAKLQFSKDTYDEDLENLLAQIGDEYADLFVAAKNLSDAILLSGILTVNTEITKAPLSASMIKRYDEHHQDLTLLKKFIRQQLPEKYKEIFFDASKNGYAGYIDGGASQEEFYKYIKPILSKIDGSEYFLDKIEREDFLRKQRTFDNGSIPHQIHLQELHAILRRQEEFYPFLKENQEKIEKILTFRIPYYVGPLARGNSRFAWASRKSDETITPWNFEEVVDKEASAQAFIERMTNNDKNLPEEKVLPKHSLLYEKFTVYNELTKVKYVTEGMRKPAFFDSEQKQEIVDLLFKTNRKVTKKKLKEYLFKEIECFDSVEISGVEDRFNASLGTYHDLLKIIKDKDFLDNEENEEILEDIVLTLTLFEDREMIKERLSKYADLFDKKVLKKLERRRYTGWGRLSAKLINGIRDKQSGKTILDYLIDDGFANRNFMQLIHDDSLSFKEEIKKAQVIGDTDSLHEVIANLAGSPAIKKGILQSIKIVDELVKVMGRHNPENIVIEMARENQTTQKGQRNSRERLKRLEEAIKELGSNILKEHPVENTQLQNDKLYLYYLQNGKDMYTGEELDIDRLSDYDVDHIIPQSFIKDDSIDNRVLTSSAKARGKSDNVPSEEVVKKMKSFWRQLLDSKLISQRKFDNLTKAERGGLTELDKAGFIKRQLVETRQITKHVAQILDSRFNTKYDENDKLIREVKIITLKSKLVSDFRKDFQLYKVREINDYHHAHDAYLNAVVGTALIKKYPKLESEFVYGDYKVYNSYKMIAKSEQEIGKATAKYFFYSNIMNFFKTDITLANGEIRKRPLIETNEETGEIVWDKDKDFATVRKVLSMPQVNIVKKTEVQTGGFSKESILPKRNSDKLIARKKDWDTKKYGGFDSPTVAYSVLVIADIEKGKAKKLKTVKELVGITIMERSAFEKNPVAFLEDKGYQNIQKENIIKLPKYSLFELENGRKRLLASAGELQKGNELALPNKYVTLLYHAKHYEKLKESPEDNPEKLEYVEQHRDEFDEIFDQISEFSERYILADKNLEKIQEAYAKNEDASIEELAESFINLLTFTALGAPAAFKFFGKTIDRKRYTSTKEILNATLIHQSITGLYETRIDLSQLGGD

SEQ ID NO: 247 - protein, 1368 aa, synthetic construct
MDKPYSIGLDIGTNSVGWAVVTDEYKVPSKKFKVLGNTDRHSIKKNLIGALLFDSGETAEATRLKRTARRRYTRRKNRIRYLQEIFAEEMSKVDDSFFHRLEESFLVEEDKRGERHPIFGNIVDEVAYHEKYPTIYHLRKHLADSSEKADLRLIYLALAHIIKFRGHFLIEGDLNAENTDVQKLFKQLVDVYDQTFEESHLSEETVDAKSILTEKVSKSRRLENLIKCFPNEKRNGLFGNLIALSLGLTPNFKSNFELAEDAKLQFSKDTYDEDLENLLAQIGDQYADLFVAAKNLYDAILLSGILTVNTEITKAPLSASMIKRYDEHHQDLTLLKHFVRTQLPEKYKEIFFDVSKNGYAGYIDGGASQEEFYKYLKPILSKIDGTEYLLDKIEREDFLRKQRTFDNGSIPHQIHLQELKAILRRQEDYYPFLKENQEKIEKILTFRIPYYVGPLARGNSRFAWMSRKSDETITPWNFEEVIDKEASAQAFIERMTNFDKNLPEEKVLPKHSLLYEKFTVYNELTKVKYVTEGMRKPAFFSANQKQEIVDLLFKKNRKVTKKKLKNFLFKKFDCFDIVEISGVEDRFNASLGTYHDLLKIIKDKDFLDNSENEEIFEEIILTLTLFEDREMIEERLKKYAHLFDKKVLKKLKRRRYTGWGRLSKKLINGIRDKQSGKTILDYLIDDGFSNRNFMQLIHDDSLTFKEEIAKAQVIGQSESLHETIANLAGSPAIKKGILQSLKIVDELVKVMGRHNPENIVIEMARENQTTQKGQRNSRERMKRLEEAIKELGSQILKEHPVENTQLQNDKLYLYYLQNGKDMYTGEELDIDRLSDYDVDHIIPQSFIKDDSIDNRVLTSSAEARGKSDNVPSEEVVKKMKSFWRRLLDSKLISQRKFDNLTKAERGGLSELDKAGFIKRQLVETRQITKHVAQILDSRFNTKYDENDKLIRNVKIITLKSKLVSDFRKDFQFYKVREINDYHHAHDAYLNAVVGTALIKKYPKLESEFVYGDYKVYDSRKMIAKSEQEIGKATAKYFFYSNIMNFFKSEITLANGEIRKRPLIETNEETGEIVWDKKKDIATVRKVLSMPQVNIVKKTEVQTGGFSKESILPKRNSDKLIARKKDWDTKKYGGFDSPTVAYSVLVVADIEKGKSKKLKTVKELVGITIMERSAFEKDPIAFLEKKGYKNIQKDNIIKLPKYSLFELENGRKRLLASAGELQKGNELALPNHYVTLLYHAKRYEKLKGSPEDNEKHLEYVEQHRAEFDEILSQISEFSERYILADKNLEKIQELYAKNRDEDIKELASSFINLFTFTALGAPAAFKFFDKTIDRKRYTSTTEVLNATLIHQSITGLYETRIDLSQLGGD

SEQ ID NO: 248 - protein, 1368 aa, synthetic construct
MDKKYSIGLDIGTNSVGWAVITDEYKVPSKKFKVLGNTDRHSIKKNLIGALLFDSGETAEATRLKRTARRRYTRRKNRICYLQEIFSNEMAKVDESFFHRLEESFLVEEDKRGERHPIFGNIVDEVAYHEKYPTIYHLRKHLADSTEKADLRLIYLALAHMIKFRGHFLIEGDLNSENTDVQKLFKQFVEAYDQTFEESHLEEITVDAKAILTEKLSKSRRLENLIAQFPGEKKNGLFGNLIALSLGLTPNFKSNFKLSEDAKLQFSKDTYDEDLENLLGQIGDEYADLFVAAKNLYDAILLSGILTVNDESTKAPLSASMIKRYDEHHQDLTLLKAFVREQLPEKYKEIFFDESKNGYAGYIDGGASQEEFYKYIKPILEKVDGSEYFLDKIEREDFLRKQRTFDNGSIPHQIHLQELHAILRRQEEYYPFLKENQEKIEKILTFRIPYYVGPLARGNSRFAWMTRKSDETITPWNFEEVVDKEASAQAFIERMTNNDKNLPEEKVLPKHSLLYEKFTVYNELTKVKYVTEGMGKAEFFDANQKQEIFDGLFKKNRKVTKKKLLDFLFKEFEEFRIVDISGVEDAFNASLGTYHDLLKIIKDKEFLDNEENEDILEDIVLTLTLFEDREMIEKRLKKYADLFDKKVLKKLERRRYTGWGRLSAKLINGIRDKQSGKTILDYLIDDGFANRNFMQLIHDDSLTFKEEIKKAQVIGESDSLHEHIANLAGSPAIKKGILQTVKVVDELVKVMGRHKPENIVIEMARENQTTQKGQKNSRERMKRIEEGIKELGSQILKEHPVENTQLQNEKLYLYYLQNGRDMYVDQELDINRLSDYDVDHIVPQSFLKDDSIDNKVLTRSDKARGKSDNVPSEEVVKKMKNYWRQLLNAKLITQRKFDNLTKAERGGLSELDKAGFIKRQLVETRQITKHVAQILDSRMNTKYDENDKLIREVKVITLKSKLVSDFRKDFQFYKVREINNYHHAHDAYLNAVVGTALIKKYPKLESEFVYGDYKVYDVRKMIAKSEQEIGKATAKYFFYSNIMNFFKTEITLANGEIRKRPLIETNGETGEIVWDKGRDFATVRKVLSMPQVNIVKKTEVQTGGFSKESILPKRKSDKLIARKKDWDTKKYGGFDSPTVAYSVLVVADVEKGKAKKLKTVKELVGITIMERSAFEKNPVAFLEDKGYQNIQEDNIIKLPKYSLFELENGRKRLLASAGELQKGNELALPNKYVTLLYHAKNYEKLKGKSEDEEEHLEYVSKHNDEFKEILDQISEFSERYILADKNLEKIKELYEQNEDYSISELASSFINLLTFTALGAPAAFKFFGTTIDRKRYTSTKEILNSTLIHQSITGLYETRIDLSKLGGD

SEQ ID NO: 249 - protein, 1368 aa, synthetic construct
MDKKYSIGLDIGTNSVGWAVITDEYKVPSKKFKVLGNTDRHSIKKNLIGALLFDSGETAEATRLKRTARRRYTRRKNRIRYLQEIFSEEMSKVDDSFFHRLEESFLVEEDKRHERHPIFGNIVDEVAYHENYPTIYHLRKKLADSTEKADLRLIYLALAHIIKFRGHFLIEGDLNPDNTDVDKLFIQLVQTYNQLFEENPIHEENVDAKAILTAKLSKSRRLENLIAQIPGEKKNGLFGNLIALSLGLTPNFKSNFDLAEDAKLQLSKDTYDEDLDNLLAQIGDQYADLFLAAKNLSDAILLSDILTVNDEITKAPLSASMIKRYDEHHQDLTLLKALVREQLPEKYKEIFFDQSKNGYAGYIDGGASQEEFYKYIKPILSKLDGTEELLAKLNREDLLRKQRTFDNGSIPHQIHLGELHAILRRQEDFYPFLKENREKIEKILTFRIPYYVGPLARGNSRFAWMTRKSDETITPWNFEEVVDKEASAQAFIERMTNFDKNLPNEKVLPKHSLLYEYFTVYNELTKVKYVTEGMRKPEFLSAEQKEEIVDLLFKTNRKVTVKQLKEFLFKKIDCFDSVEISGVEDRFNASLGTYHDLLKIIKDKDFLDNEENEAILEDIVLTLTLFEDKEMIEERLSKYAHLFDKKVLKQLKRRRYTGWGRLSRKLINGIKDKQSGKTILDFLKSDGFANRNFMQLIHDDSLTFKEDIQKAQVEGQGESLHEQIANLAGSPAIKKGILQTVKVVDELVKVMGRHKPENIVIEMARENQTTQKGQKNSRERMKRIEEGIKELGSQILKEHPVENTQLQNEKLYLYYLQNGRDMYVDQELDINRLSDYDVDHIVPQSFLKDDSIDNKVLTRSDKARGKSDNVPSEEVVKKMKNYWRQLLNAKLITQRKFDNLTKAERGGLSELDKAGFIKRQLVETRQITKHVAQILDSRFNTEYDENDKLIREVKIITLKSKLVSDFRKEFQFYKVREINDYHHAHDAYLNAVVGKALIKKYPKLESEFVYGDYKVYDVRKMIAKSEQEIGKATAKYFFYSNIMNFFKSEITLANGEIRKRPLIETNEETGEIVWDKGKDFATVKKVLSMPQVNIVKKTEVQTGGFSKESILPKRNSDKLIARKKDWDTKKYGGFDSPTVAYSVLVVAKVEKGKSKKLKTVKELVGITIMERSSFEKDPVAFLEAKGYKNVQKHLIIKLPKYSLFELENGRKRLLASAGELQKGNELALPSKYVTLLYHASHYEKLKGKPEDEEKKLEYVEQHRYYFDEILEQIVEFSKRYILADKNLEKIQELYSENESYPIEELAENFIHLFTFTALGAPAAFKFFDTDIDRKRYTSTTEILNATLIHQSITGLYETRIDLSQLGGD

SEQ ID NO: 250 - protein, 1368 aa, synthetic construct
MDKPYSIGLDIGTNSVGWAVVTDEYKVPSKKFKVLGNTDRHSIKKNLLGALLFDSGETAEATRLKRTARRRYTRRKNRIRYLQEIFAEEMNKVDDSFFHRLEESFLVEEDKRGERHPIFGNIVDEVAYHEKYPTIYHLRKKLADSTEKADLRLVYLALAHMIKFRGHFLIEGDLDAENTDVQKLFEEFVQVYDNTFEESHLSEETVDASSILTAKLSKSRRLENLIKLYPNEKKNGLFGNLIALSLGLQPNFKTNFNLAEDAKLQFSKDTYEEDLENLLGQIGDEYADLFVAAKNLYDAILLSGILTVNTEITKAPLSASMIKRYDEHHQDLTLLKEFIRANLPEKYKEIFFDETKNGYAGYIDGGAKQEEFYKYLKPILSKIDGSEYFLDKIEREDFLRKQRTFDNGSIPHQIHLQELHAILRRQGEFYPFLKENQEKIEKILTFRIPYYVGPLARGNSRFAWASRKSDETITPWNFDEVVDKESSAEAFIERMTNNDKNLPEEKVLPKHSLLYEKFTVYNELTKVKYITEQMRKPAFFDANVKKEIFDLVFKKNRKVTKKKLLDYLFKEFDEFRIVDISGVEKSFNASLGTYHDLLKIIKDKEFLDNEENEKILEDIVLTLTLFEDREMIDKRLEKYADLFDKKVLKKLERRRYTGWGRLSAKLINGIRDKQSGKTILDYLIDDGFANRNFMQLIHDDSLSFKEEIQKAQVIGQTDSLHEVIADLAGSPAIKKGILQSLKIVDELVKVMGRHKPENIVIEMARENQTTQKGQRNSRERLKRLEEAIKELGSKILKEHPVENTQLQNDKLYLYYLQNGKDMYTGEELDIDRLSDYDVDHIIPQSFIKDDSIDNRVLTSSKEARGKSDDVPSEEVVKKMKSFWNRLLKAKLISQRKFDNLTKAERGGLTELDKAGFIKRQLVETRQITKHVAQILDSRFNTKYDENDKLIRKVKIVTLKSKLVSQFRKEFQLYKVREINDYHHAHDAYLNAVVGKALIKKYPKLESEFVYGDYKVYNSRKMIAKSEQEIGKATAKYFFYSNIMNFFKTDVTLANGEIRKRPLIETNKETGEIVWDKEKDFATVRKVLSMPQVNIVKKTEVQTGGFSKESILPKRDSDKLIARKKDWDTKKYGGFDSPTVAYSVLVVADIEKGKVKKLKTVKELVGITIMERSSFEKNPIAFLEDKGYKNVQKENIIKLPKYSLFELENGRKRLLASAGELQKGNELALPQKYVTLLYHAKHYEKLKESPEDNEKHLLYVEQHRSYFDEILDQISEFSKRYILADKNLDKIKELYAENEGADVEELASSFINLLTFTALGAPAAFKFFDADIDRKRYTSTTEILDATLIHQSITGLYETRIDLSQLGGD

SEQ ID NO: 251 - protein, 1368 aa, synthetic construct
MKKDYTIGLDIGTNSVGYAVVYAEYKVVSKKFKVLGNGQRKSIKKNFWGVRLFDSGETAEATRLKRTARRRYTRRKNRIRYLQEIFNEEMNAVDQNFFHRLEESFLVEEDKRNERHPIFATIVEEVAYHEEYPTIYHLRKHLADCKEQSDIRLVYLALAHIIKFRGHFLIEGKLSTENTSIRENFKKFLQIYNQTFSVQEDGSETSGVEELLQEKASRQKKAENVLKLFPTEKANGTFMQFLKLIVGNQGNFKKTFNLSEDVKLQFSKDTYEEQLEELLANVGDDYAEVFVAAKNVYDAIELSGILTVKDFTTKAKLSASMVKRYDEHHQDLTKLKKFIRDKLPEKYKDIFFNEKKNGYAGYIDGGAKQDDFYKYLKKVLNRAEGADYFLDKIDKEEFLRKQRTFDNGSIPHQIHLEELRAIIGKQAKYYPFLAENKAKIEQILTFRIPYYVGPLARGNSRFAWLSRKKQETITPWNYGELIDEGKTATDFIERMTNYDKNLPQEKVLPKHSMLYEKFTVFNELTKVKYIDDRMGETQFFSSLEKREIFEELFKKSRKVKLTDLENFLKNQFYMIEVSKISGVEKSFNASYGTYHDFRKIGIEREVLDAPENEEMFEEIIKILTVFEDRKMIREQLSKYGDFFEPKILKKLERRRYTGWGRLSAKLINGIKDKHTKKTILDYLMRDDAKNRNFMQLIHDDSLSFKEEIAKEQADEQTDSLHEIIANLAGSPAIKKGILQSLKIVDEIVKVMGRYAPKNIVVEMARENQTTQKGQDNSRERLKNLEDAIKELGSNILKEYPLDNTDLQRDKLYLYYLQNGKDMYTGLDLDIDQLSDYDVDHIIPQSFIKDDSIDNLVLVSSSKARGKSDDVPSIEIVEKMKPEWERLKNANLISQRKYDNLTKAERGGLTELDKAGFIKRQLVETRQITKHVAQILHQRFNSEKTSEGKLERRTKIITLKSKLTSQFRKIYGLYKVREINDYHHGHDAYLNGVVANALIKVYPNLESEFVYGDYRVFNSFKLVRETDEKIGKATAKKEFYSNLMRFFKSDQKLADDSVIEKPRVEVDDENGEILWGQKKDISTVKKVMSMPQVNIVKKTEVQTGGFSKESILPKRDSDKLIARKKDWDTRKYGGFDSPTVAYSVVISYEKGKKKKQKIKTVKDIVGITIMERSKFEENEVQFLIDKGFVNPKEIVEVKLPKYTLYEVENGRKRLLASAGELQKGNELALPNHYVTLLYHAKHYEKIKEKEKEEKNSYNYLVDHRKEFDELFEQVKEFAERYTLADKNLEKITTLFEENHEADIKLIAQSFLNLMQFNAMGAPAAFKFFGQVIDRKRYTSIKELLNATIIHQSITGLYETRIKLGKLGEE

SEQ ID NO: 252 - protein, 1368 aa, synthetic construct
MDKPYSIGLDIGTNSVGWAVITDEYKVPSKKFKVLGNTDRHSIKKNLLGALLFDSGETAEATRLKRTARRRYTRRKNRIRYLQEIFAEEMSKVDDSFFHRLEESFLVEEDKRGERHPIFGNIVEEVAYHEEYPTIYHLRKHLADSTEKADLRLVYLALAHMIKFRGHFLIEGDLDSENTDVQKLFEQFVQVYDNTFEESHLSEETVDAESILTAKISKSRRLENLIKLFPGEKKNGLFGNLIALILGLQPNFKTNFELSEDAKLQFSKDTYEEDLENLLGQIGDDYADLFVAAKNLYDAILLSGILTVNTEITKAPLSASMIKRYDEHHQDLTLLKKFIRENLPEKYKEIFFDESKNGYAGYIDGGASQEEFYKYIKNLLSKIDGSEYFLDKIEREDFLRKQRTFDNGSIPHQIHLQELHAILRRQGEYYPFLKENQEKIEKILTFRIPYYVGPLARGNSRFAWASRKSDETITPWNFEEVVDKESSAEAFIERMTNNDKNLPEEKVLPKHSLLYEKFTVYNELTKVKYITEGMRKPAFFDANQKQEIFDGLFKKNRKVTKKKLLEFLFKEFDEFRIVDISGVEKAFNASLGTYHDLLKIIKDKDFLDNEENEDILEDIVLTLTLFEDREMIEKRLSKYADLFDKKVLKKLERRRYTGWGRLSAKLINGIRDKQSGKTILDYLIDDGFANRNFMQLIHDDSLSFKEEIQKAQVIGQTDSLHETIADLAGSPAIKKGILQSLKIVDELVKVMGRHAPENIVIEMARENQTTQKGQRNSRERLKRLEESIKELGSKILKEHPVDNTQLQNDKLYLYYLQNGRDMYTGEELDIDRLSDYDVDHIIPQSFIKDDSIDNRVLTSSAKARGKSDDVPSEEVVKKMKSFWQQLLDSKLISQRKFDNLTKAERGGLTELDKAGFIKRQLVETRQITKHVAQILDSRFNTKYDENDKLIRDVKIITLKSKLVSQFRKEFGFYKVREINDYHHAHDAYLNAVVGKALIKKYPKLESEFVYGDYPVYNSYKMIAKSEQEIGKATAKYFFYSNIMNFFKKDVTLANGEIRKRPLIETNEETGEIVWDKEKHIATVKKVLSMPQVNIVKKTEVQTGGFSKESILPKRNSDKLIARKKDWDTKKYGGFDSPTVAYSVLVVADIEKGKAKKLKTVKELVGITIMERSSFEKNPVAFLENKGYQNIQKENIIKLPKYSLFELENGRKRLLASAGELQKGNELALPNKYVTLLYHAKHYEKLKESPEDNPEHLEYVEEHRDEFDELFDQISEFSKRYILADKNLEKIKELYNENEEASIEELAESFINLLTFTALGAPAAFKFFGVDIDRKRYTSTTEILNATLIHQSITGLYETRIDLSQLGGD

SEQ ID NO: 253 - protein, 1368 aa, synthetic construct
MDKKYSIGLDIGTNSVGWAVITDEYKVPSKKFKVLGNTDRHSIKKNLIGALLFDSGETAEATRLKRTARRRYTRRKNRICYLQEIFSNEMAKVDDSFFHRLEESFLVEEDKRGERHPIFGNIVEEVAYHEKYPTIYHLRKHLADSDEKADLRLVYLALAHIIKFRGHFLIEGDLKSENSDVQKLFKDLVEVYDQTFEESHLSEETVDAESILTEKISKSRRLENLIKQFPNEKKNGLFGNLIALSLGLQPNFKTNFDLSEDAKLQFSKDTYDEDLENLLGQIGDEYADLFLAAKNLYDAILLSGILTVNDESTKAPLSASMIKRYDEHHQDLTLLKKFIREQLPEKYKEIFFDETKNGYAGYIDGGASQEEFYKYIKKILEKVDGSEYFLEKIEREDFLRKQRTFDNGSIPHQIHLQELHAILRRQEEYYPFLKENQEKIEKILTFRIPYYVGPLARGNSRFAWMSRKSDETITPWNFDEVVDKEASAEAFIERMTNFDKNLPEEKVLPKHSLLYEKFTVYNELTKVKYVTEGMGKPKFFDANMKQEIFDGLFKKNRKVTKKKLLDFLDKEFDEFRIVDISGVEKAFNASLGTYHDLLKIIKDKDFLDNEENEDILEDIVLTLTLFEDREMIEKRLEKYADLFDKKQLKKLERRRYTGWGRLSAKLINGIRDKQSGKTILDYLIDDGFANRNFMQLIHDDALSFKEEIQKAQVIGEGDSLHEHIANLAGSPAIKKGILQTVKVVDELVKVMGRHKPENIVIEMARENQTTQKGQKNSRERMKRIEEGIKELGSQILKEHPVENTQLQNEKLYLYYLQNGRDMYVDQELDINRLSDYDVDHIVPQSFLKDDSIDNKVLTRSDKARGKSDNVPSEEVVKKMKNYWRQLLNAKLITQRKFDNLTKAERGGLSELDKAGFIKRQLVETRQITKHVAQILDSRMNTKYDENDKLIREVKVITLKSKLVSDFRKDFQFYKVREINNYHHAHDAYLNAVVGTALIKKYPKLESEFVYGDYKVYDVRKMIAKSEQEIGKATAKYFFYSNIMNFFKTEITLANGEIRKRPLIETNGETGEIVWDKGRDFATVRKVLSMPQVNIVKKTEVQTGGFSKESILPKRNSDKLIARKKDWDTKKYGGFDSPTVAYSVLVVADIEKGKKKKLKTVKELVGITIMERSRFEKNPVAFLEDKGYKNIQEEKIIKLPKYSLFELENGRKRLLASAGELQKGNELALPAHYVTLLYHAKNYEKLKEKPEDEEKHLEYVDKHRDEFKEILDQISEFSERYILADGNLEKIKELYKKNEDASISELASSFINLLTFTALGAPAAFKFLGSTIDRKRYTSTTEILNATLIHQSITGLYETRIDLSKLGGD

SEQ ID NO: 254 - protein, 1368 aa, synthetic construct
MKKPYSIGLDIGTNSVGWAVVTDDYKVPSKKMKVLGNTDRQSIKKNLLGALLFDSGETAEATRLKRTARRRYTRRKNRILYLQEIFAEEMNKVDDSFFHRLEDSFLVEEDKRGERHPIFGNIVEEVAYHEKFPTIYHLRKHLADSTEKADLRLVYLALAHIIKFRGHFLIEGDLNTENTDVQKLFKKFVEVYDRTFEESHLSEETVDAEEILTEKVSKSRKLENLLKQFPNEKKNGLFGNLIALSLGLQPNFKTNFELSEDAKLQFSKDTYDEDLENLLGQIGDEYADLFVAAKNLYDAILLSGILTVNDLSTKAPLSASMIKRYEEHHEDLTLLKKFIRKNLPEKYKEIFFDESKNGYAGYIDGGTSQEEFYKYIKNLLSKIDGSEYFLDKIEREDFLRKQRTFDNGSIPHQIHLQELKAILRRQGEFYPFLKENQEKIEKILTFRIPYYVGPLARGNSRFAWASRKSDETITPWNFDEVIDKEKSAEAFIERMTNNDLYLPEEKVLPKHSLLYEKFTVYNELTKVKYVTEGMGEAEFFDANLKQEIFDGLFKKERKVTKKKLLEFLDKEFDEFRIVDISGVEKAFNASLGTYHDLLKIIKDKEFLDNEENEDILEDIVLTLTLFEDREMIKQRLSKYADLFDKKVLKKLERRHYTGWGRLSAKLINGIRDKQSGKTILDYLIDDGFANRNFMQLIHDDNLSFKEEIAKAQVIGESDSLHEVVAELAGSPAIKKGILQSLKIVDELVKVMGRYAPENIVVEMARENQTTAKGQRNSRERLKRLEEAIKELGSKILKEHPVENQQLQNDRLYLYYLQNGKDMYTGEELDIDRLSQYDVDHIIPQSFIKDDSIDNRVLTSSAKARGKSDDVPSEEVVKKMKSFWSKLLNAKLISQRKFDNLTKAERGGLTEDDKAGFIKRQLVETRQITKHVAQILDERFNTEFDENNKLIRKVKIITLKSKLVSNFRKEFEFYKVREINDYHHAHDAYLNAVVGKALIKKYPKLEPEFVYGDYPKYNSYKLVAKSEQERGKATAKMFFYSNIMNFFKSDIKLADGTIVERPMIEVNEETGEIAWDKTKHIATVKKVLSMPQVNIVKKTEVQTGGFSKESILPKRNSDKLIARKKKWDTKKYGGFDSPTVAYSVLVVADIEKGKSKKLKTVKELVGITIMERSRFEKNPVAFLEDKGYQNIQEENIIKLPKYSLFELENGRKRLLASAGELQKGNELALPNKLVTLLYHAKHIEKLDEKPEDIEKHLEYVEKHRDEFKEILDQISEFSKRYILADKNLEKIEELYAKNEDASIEELASSFINLLTFTALGAPADFKFFGKTIDRKRYTSTTEILNATLIHQSITGLYETRIDLSKLGGD

SEQ ID NO: 255 - protein, 1368 aa, synthetic construct
MDKPYSIGLDIGTNSVGWAVVTDEYKVPSKKFKVLGNTDRHSIKKNLLGALLFDSGETAEATRLKRTARRRYTRRKNRILYLQEIFAEEMNKVDDSFFHRLEESFLVEEDKRNERHPIFGNIVDEVAYHENYPTIYHLRKKLADSPEKADLRLIYLALAHIIKFRGHFLIEGDLNVENTDVQKLFKDFVETYDQTFEESHLSEISVDAKEILTAKISKSRKLENLIKQFPNEKKNGLFGNLIKLSLGLQPNFKSNFKLSEDAKLQFSKDTYEEDLENLLAQIGDEYADLFLAAKNLYDAILLSGILTVNTEITKAPLSASMVKRYDEHHQDLTLLKKFIREQLPEKYKEIFFDKSKNGYAGYIDGGASQEEFYKYIKKILSKIEGSEYFLDKIEREDFLRKQRTFDNGSIPHQIHLEELKAILRRQEEYYPFLKENREKIEKILTFRIPYYVGPLARGNSRFAWASRKSDETITPWNFEEVVDKEKSAEDFIERMTNNDKNLPEEKVLPKHSLLYEKFTVYNELTKVKYVTEGMRKPAFFDAGQKKEIVDLLFKTNRKVTKKKLLEFLFKEFDEFDIVDISGVEKAFNASLGTYHDLLKIIKDKDFLDNEENEKILEDIILTLTLFEDREMIKKRLSKYANLFDKKVLKKLERRRYTGWGRLSAKLINGIRDKQSGKTILDYLIDDGFSNRNFMQLIHDDSLSFKEEIQKAQVIGQTDSLHQTIADLAGSPAIKKGILQSIKIVDELVKVMGRHAPENIVIEMARENQTTQKGQRNSRERLKKLEESIKELGSQILKEHPVDNTQLQNDKLYLYYLQNGKDMYTGEELDIDRLSDYDVDHIIPQSFIKDDSIDNRVLTSSAKARGKSDDVPSEEVVKKMKSFWRQLLDAKLISQRKFDNLTKAERGGLTELDKAGFIKRQLVETRQITKHVAQILDSRFNTKYDENDKLIRDVKIITLKSKLVSQFRKEFGFYKVREINDYHHAHDAYLNAVVGKALIKKYPKLESEFVYGDYKVYNSYKMIAKSEQEIGKATAKYFFYSNIMNFFKEEITLANGEIRKRPLIETNEETGEIVWDKDKHIATVKKVLSMPQVNIVKKTEVQTGGFSKESILPKRESDKLIARKKDWDTKKYGGFDSPTVAYSVLVVADIEKGKAKKLKTVKELVGITIMERSSFEKNPVAFLEKKGYQNIQKENIIKLPKYSLFELENGRKRLLASAGELQKGNELALPNKYVTLLYHAKNYEKLKESPEDNEKHLEYVEEHRDEFDEIFDQISEFSKRYILADKNLEKILELYDENRDAPIKELAESFINLLTFTALGAPAAFKFFDKTIDRKRYTSTTEILDATLIHQSITGLYETRIDLSQLGGD

SEQ ID NO: 256 - protein, 1368 aa, synthetic construct
MDKPYSIGLDIGTNSVGWAVITDEYKVPSKKFKVLGNTDRHSIKKNLLGALLFDSGETAEATRLKRTARRRYTRRKNRIRYLQEIFAEEMSKVDDSFFHRLEESFLVEEDKRGERHPIFGNIVDEVAYHEKYPTIYHLRKHLADSPEKADLRLVYLALAHMIKFRGHFLIEGDLKAENTDVQKLFINFVETYDNTFEESHLSEITVDASSILTEKVSKSRRLENLIKQFPTEKKNGLFGNLIALSLGLQPNFKSNFELSEDAKLQFSKDTYEEDLENLLAQIGDQYADLFVAAKNLYDAILLSGILTVKTEITKAPLSASMIKRYDEHHQDLTLLKALIRENLPEKYKEIFFDESKNGYAGYIDGGASQEEFYKYIKPILLKMEGSEYFLDKIEREDFLRKQRTFDNGSIPHQIHLQELHAILRRQEEYYPFLKENQEKIEKILTFRIPYYVGPLARGNSRFAWASRKSDETITPWNFEEVVDKEASAEAFIERMTNNDKNLPEEKVLPKHSLLYEKFTVYNELTKVKYVTERMRKPAFFDAEMKQEIVDLLFKENRKVTVKQLLEYLFKEFDEFRSVDISGVEDRFNASLGTYHDLLKIIKDKAFLDNEENEDILEDIILTLTLFEDREMIKKRLSKYADLFDKKVLKKLERRRYTGWGRLSAKLINGIRDKQTGKTILDYLIDDGFANRNFMQLIHDDSLSFKEEIAKAQVIGQGDSLHETIADLAGSPAIKKGILQSIKIVDELVKVMGRHAPENIVIEMARENQTTQKGQRNSRERLKRLEESIKKLGSKILKEHPVENTQLQNDKLYLYYLQNGKDMYTGEELDIDNLSDYDVDHIIPQSFIKDDSIDNRVLTSSAKARGKSDDVPSEEVVKKMKSFWRQLLKAKLISQRKFDNLTKAERGGLTELDKAGFIKRQLVETRQITKHVAQILDSRFNTKYDENDKLIRKVKIITLKSKLVSQFRKDFGFYKVREINDYHHAHDAYLNAVVGTALIKKYPKLESEFVYGDYPVYNSRKMIAKSEQEIGKATAKYFFYSNIMNFFKSDVTLANGEIRKRPLIETNEETGEIAWDKEKDFATVRKVLSMPQVNIVKKTEVQTGGFSKESILPKRDSDKLIARKKDWDTKKYGGFDSPTVAYSVLVVADIEKGKSKKLKTVKELVGITIMERSAFEKNPIAFLEKKGYQNIQKDNIIKLPKYSLFELENGRKRLLASAGELQKGNELALPNKYVTLLYHAARYEKSKESPEDNPNHLLYVEKHKEEFDEILDQISEFSKRYILADSNLEKIEELYANNNKKDISELASSFINLFTFTALGAPAAFKFFGATIDRKRYTSTTEILNATLIHQSITGLYETRIDLSQLGGD

SEQ ID NO: 257 - protein, 1368 aa, synthetic construct
MKKPYSIGLDIGTNSVGWAVVTDEYKVPSKKFKVLGNTDRQSIKKNLLGALLFDSGETAEATRLKRTARRRYTRRKNRILYLQEIFAEEMNKVDDSFFHRLEESFLVEEDKRGERHPIFGNIVEEVAYHEKYPTIYHLRKHLADSTEKADLRLVYLALAHIIKFRGHFLIEGDLNTENTDVQKLFKQFLEVYDQTFEESHLSEETVDAEAILTEKISKSRKLENLIKQFPNEKKNGLFGNLIALSLGLQPNFKSNFELSEDAKLQFSKDTYEEDLENLLGQIGDEYADLFVAAKNLYDAILLSGILTVNDNSTKAPLSASMIKRYDEHHQDLTLLKAFIRENLPEKYKEIFFDKSKNGYAGYIDGGAKQEEFYKYLKKLLSKIDGSEYFLEKIEREDFLRKQRTFDNGSIPHQIHLQELHAILRRQEEFYPFLKENQEKIEKILTFRIPYYVGPLARGNSRFAWASRKSDETITPWNFDEVIDKEASAQAFIERMTNNDKNLPEEKVLPKHSLLYEKFTVYNELTKVKYVTEGMGEAQFFDANLKQEIFDGLFKKERKVTKKKLLEFLFKEFDEFRIVDISGVEKRFNASLGTYHDLLKIIKDKDFLDNEENEKILEDIVLTLTLFEDREMIKKRLSKYADLFDKKQLKKLERRRYTGWGRLSAKLINGIRDKQSGKTILDYLIDDGFANRNFMQLIHDDNLTFKEEIAKAQVIGESDSLHEVIADLAGSPAIKKGILQSLKIVDELVKVMGRYNPENIVVEMARENQTTQKGQRNSRERLKRLEESIKNLGSNILKEHPVENTQLQNDKLYLYYLQNGKDMYTGEELDIDRLSDYDVDHIIPQSFIKDDSIDNRVLTSSEKARGKSDDVPSEEVVKKMKSFWSKLLNAKLISQRKFDNLTKAERGGLTELDKAGFIKRQLVETRQITKHVAQILDERFNTEFDENNKLIRKVKIITLKSKLVSNFRKEFELYKVREINDYHHAHDAYLNAVVGKALIKKYPKLESEFVYGDYPVYNSYKMVAKSDKEIGKATAKMFFYSNIMNFFKTDIKLADGRIVERPQIETNEETGEIVWDKEKHIATVKKVLSMPQVNIVKKTEVQTGGFSKESILPKRNSDKLIARKKDWDTKKYGGFDSPTVAYSVLVVADIEKGKAKKLKTVKELVGITIMERSRFEKNPVAFLEDKGYQNIQKEKIIKLPKYSLFELENGRKRLLASAGELQKGNELALPQKYVTLLYHAKHYEKLKEKPEDIEKHKEYVEKHRSEFDEILDQISEFSKRYILADKNLEKIEELYEKNEDASIEELASSFINLLTFTALGAPAAFKFFGKTIDRKRYTSTTEILNATLIHQSITGLYETRIDLSKLGGD

SEQ ID NO: 258 - protein, 1368 aa, synthetic construct
MDKPYSIGLDIGTNSVGWAVVTDEYKVPSKKFKVLGNTDRHSIKKNLLGALLFDSGETAEATRLKRTARRRYTRRKNRIRYLQEIFAEEMSKVDDSFFHRLEESFLVEEDKRNERHPIFGNIVDEVAYHEKYPTIYHLRKHLADSTEKADLRLIYLALAHIIKFRGHFLIEGDLNAENTDVQKLFEQFVQTYDQTFEESHLSEETVDAKAILTDKLSKSRRLENLIAQFPTEKKNGLFGNLLALSLGLQPNFKSNFELAEDAKLQFSKDTYDEDLENLLAQIGDQYADLFVAAKNLYDAILLSGILTVNTEITKAPLSASMIKRYDEHHQDLTLLKKFIRQNLPEKYKEIFFDDTKNGYAGYIDGGASQEEFYKYIKPILEKIDGSEYFLEKIEREDFLRKQRTFDNGSIPHQIHLQELKAILRRQEEFYPFLKENQEKIEKILTFRIPYYVGPLARGNSRFAWASRKSDETITPWNFEEVVDKEASAQAFIERMTNFDKNLPDEKVLPKHSLLYEKFTVYNELTKVKYVTEGMRKPAFFDANQKQEIVDLLFKTNRKVTKKKLKEFLFKEFECFRIVEISGVEDRFNASLGTYHDLLKIIKDKDFLDNEENEDILEDIVLTLTLFEDREMIKQRLSKYADLFDKKVLKQLSRRRYTGWGRLSAKLINGIRDKQTGKTILDYLIDDGFANRNFMQLIHDDSLTFKEEITKAQVIGEGDSLHEVIADLAGSPAIKKGILQSLKIVDELVKVMGRYAPENIVIEMARENQTTQKGQKNSRERLKRLEEAIKELGSKILKEHPVENTQLQNDKLYLYYLQNGKDMYTGEELDIDRLSDYDVDHIIPQSFIKDDSIDNRVLTSSKKARGKSDDVPSEEVVKKMKSFWRQLLNAKLISQRKFDNLTKAERGGLTELDKAGFIKRQLVETRQITKHVAQILDSRFNTKYDENDKLIREVKIITLKSKLVSDFRKDFGFYKVREINDYHHAHDAYLNAVVGKALIKKYPKLESEFVYGDYPVYNSYKMIAKSEQEIGKATAKYFFYSNIMNFFKTDITLANGEIRKRPLIETNEETGEIVWDKTKDFATVKKVLSMPQVNIVKKTEVQTGGFSKESILPKRDSDKLIARKKDWDTKKYGGFDSPTVAYSVLVIADVEKGKAKKLKTVKELVGITIMERSSFEKNPIAFLEDKGYQNIQKENIIKLPKYSLFELENGRKRLLASAGELQKGNELALPNKYVTLLYHAKHYEKLKESPEDNEEKLEYVEQHRDEFDEILEQISEFSKRYILADKNLEKIKELYKKNEDASIEELAESFINLLTFTALGAPAAFKFFGKTIDRKRYTSTTEVLDATLIHQSITGLYETRIDLSQLGGD

SEQ ID NO: 259 - protein, 1368 aa, synthetic construct
MDKKYSIGLDIGTNSVGWAVITDEYKVPSKKFKVLGNTDRHSIKKNLIGALLFDSGETAEATRLKRTARRRYTRRKNRICYLQEIFSNEMAKVDDSFFHRLEESFLVEEDKRGERHPIFGNIVDEVAYHEKYPTIYHLRKHLADSTEKADLRLIYLALAHIIKFRGHFLIEGDLNSENSDVQKLFEQLVEVYDQTFEESHLSEETVDAKAILTEKLSKSRRLENLIAQFPNEKKNGLFGNLIALSLGLQPNFKSNFELSEDAKLQFSKDTYDEDLENLLGQIGDQYADLFLAAKNLYDAILLSGILTVNDEITKAPLSASMIKRYDEHHQDLTLLKAFIRQQLPEKYKEIFFDESKNGYAGYIDGGASQEEFYKYIKKILEKLDGSEYFLDKIEREDFLRKQRTFDNGSIPHQIHLQELHAILRRQEEFYPFLKENQEKIEKILTFRIPYYVGPLARGNSRFAWMSRKSDETITPWNFEEVVDKEASAQAFIERMTNFDKNLPEEKVLPKHSLLYEKFTVYNELTKVKYVTEGMGKPEFFDAEQKQEIVDGVFKKNRKVTKKQLLDFLFKEFDEFRIVDISGVEDAFNASLGTYHDLLKIIKDKDFLDNEENEDILEDIILTLTLFEDREMIEERLQKYADLFDKKVLKKLERRRYTGWGRLSRKLINGIRDKQSGKTILDYLISDGFANRNFMQLIHDDSLSFKEEIAKAQVIGETDSLHEHIANLAGSPAIKKGILQTVKVVDELVKVMGRHKPENIVIEMARENQTTQKGQKNSRERMKRIEEGIKELGSQILKEHPVENTQLQNEKLYLYYLQNGRDMYVDQELDINRLSDYDVDHIVPQSFLKDDSIDNKVLTRSDKARGKSDNVPSEEVVKKMKNYWRQLLNAKLITQRKFDNLTKAERGGLSELDKAGFIKRQLVETRQITKHVAQILDSRMNTKYDENDKLIREVKVITLKSKLVSDFRKDFQFYKVREINNYHHAHDAYLNAVVGTALIKKYPKLESEFVYGDYKVYDVRKMIAKSEQEIGKATAKYFFYSNIMNFFKTEITLANGEIRKRPLIETNGETGEIVWDKGRDFATVRKVLSMPQVNIVKKTEVQTGGFSKESILPKRDSDKLIARKKDWDTKKYGGFDSPTVAYSVLVVADIEKGKSKKLKTVKELVGITIMERSAFEKNPVAFLEDKGYQNIQEDLIIKLPKYSLFELENGRKRLLASAGELQKGNELALPQKYVTLLYHAKHYEKLKEKEEDEEKHLEYVEKHRDEFKEIVDQISEFSERYILADKNLEKIKELYSENEEASIEELASSFINLLTFTALGAPAAFKFLGATIDRKRYTSTKEILNATLIHQSITGLYETRIDLSKLGGD

SEQ ID NO: 260 - protein, 1368 aa, synthetic construct
MDKKYSIGLDIGTNSVGWAVITDEYKVPSKKFKVLGNTDRHSIKKNLIGALLFDSGETAEATRLKRTARRRYTRRKNRICYLQEIFSNEMAKVDDSFFHRLEESFLVEEDKKHERHPIFGNIVDEVAYHEKYPTIYHLRKKLVDSTDKADLRLIYLALAHMIKFRGHFLIEGDLNPDNSDVQKTFKELLDTYNQLFEESPLDEEEVDAKAILTEKISKSRRLENLIAEFPGEKKNGKFGNLLALSLGLTPNFKSNFDLSEDAKLQFSKDTYDEDLEELLGQIGDQYADLFVAAKKLYDAILLSGILTVNTEITKAPLSASMIKRYDEHHQDLTLLKALVRQQLPEKYKEIFFDQSKNGYAGYIDGGASQEEFYKFIKPILEKMDGTEELLVKLNREDLLRKQRTFDNGSIPHQIHLGELHAILRRQEDFYPFLKDNREKIEKILTFRIPYYVGPLARGNSRFAWMTRKSEETITPWNFEEVVDKGASAQSFIERMTNFDKNLPNEKVLPKHSLLYEYFTVYNELTKVKYVTEGMRKPAFLSGEQKKAIVDLLFKTNRKVTVKQLKEDYFKKIECFDSVEISGVEDRFNASLGTYHDLLKIIKDKDFLDNEENEDILEDIVLTLTLFEDREMIEERLKTYAHLFDDKVMKQLKRRRYTGWGRLSRKLINGIRDKQSGKTILDFLKSDGFANRNFMQLIHDDSLTFKEDIQKAQVSGQGDSLHEHIANLAGSPAIKKGILQTVKVVDELVKVMGRHKPENIVIEMARENQTTQKGQKNSRERMKRLEEAIKELGSKILKEYPVDNTKLQNEKLYLYYLQNGKDMYTGEPLDIDNLSDYDVDHIVPQSFLKDDSIDNKVLVSSEEARGKSDDVPSEAVVRKMKGFWSKLLEAKLITQRKFDNLTKAERGGLSELDKAGFIKRQLVETRQITKHVAQILDSRMNTKYDENDKLIREVKVITLKSKLVSDFRKDFQFYKVREINNYHHAHDAYLNAVVGTALIKKYPKLESEFVYGDYKVYDVRKMIAKSEQEIGKATAKYFFYSNIMNFFKTEITLANGEIRKRPLIETNGETGEIVWDKGRDFATVRKVLSMPQVNIVKKTEVQTGGFSKESILPKRNSDKLIARKKDWDPKKYGGFDSPTVAYSVLVVAKVEKGKSKKLKSVKELLGITIMERSSFEKNPIDFLEAKGYKEVKKDLIIKLPKYSLFELENGRKRMLASAGELQKGNELALPSKYVNFLYLASHYEKLKGSPEDNEQKQLFVEQHKHYLDEIIEQISEFSKRVILADANLDKVLSAYNKHRDKPIREQAENIIHLFTLTNLGAPAAFKYFDTTIDRKRYTSTKEVLDATLIHQSITGLYETRIDLSQLGGD

SEQ ID NO: 261 - protein, 1368 aa, synthetic construct
MKKKYSIGLDIGTNSVGWAVITDEYKVPSKKFKVLGNTDRQSIKKNLLGALLFDSGETAEATRLKRTARRRYTRRKNRIRYLQEIFAEEMSKVDDSFFQRLEESFLVEEDKRYERHPIFGNIVDEVAYHEKYPTIYHLRKKLADSTDKADLRLIYLALAHIIKFRGHFLIEGDLNSENSDVQKLFIQLVQTYNQLFEENHISEEGVDAKAILTDKLSKSRRLENLIALLPNEKKNGLFGNLIALSLGLTPNFKSNFDLAEDAKLQFSKDTYDEDLDNLLAQIGDQYADLFLAAKNLSDAILLSDILTVNDEITKAPLSASMIKRYDEHHQDLTLLKKLVRQQLPEKYKEIFFDDSKNGYAGYIDGGASQEEFYKYIKPILEKMDGTEELLAKINREDLLRKQRTFDNGSIPHQIHLKELHAILRRQEDFYPFLKENQEKIEKILTFRIPYYVGPLARGNSRFAWMKRKSEETITPWNFEEVVDKEASAQAFIERMTNFDKNLPNEKVLPKHSLLYEYFTVYNELTKVKYVTEGMRKPEFFSGEQKKEIVDLLFKTNRKVTVKQLKEDYFKEIECFDSVEISGVEDRFNASLGTYHDLLKIIKDKDFLDNEENEDILEDIVLTLTLFEDREMIEERLEKYADLFDKKVLKQLKRRRYTGWGRLSRKLINGIRDKQSGKTILDFLKDDGFANRNFMQLIHDDSLTFKEEIQKAQVIGQKDSLHETIANLAGSPAIKKGILQSVKIVDELVKVMGRHKPENIVIEMARENQTTQKGQKNSRERMKRIEEGIKELGSQILKEHPVENTQLQNEKLYLYYLQNGRDMYVDQELDINRLSDYDVDHIVPQSFLKDDSIDNKVLTRSDKARGKSDNVPSEEVVKKMKNYWRQLLNAKLITQRKFDNLTKAERGGLSELDKAGFIKRQLVETRQITKHVAQILDSRFNTKIDENDKLIRDVKIITLKSKLVSDFRKDFQLYKVREINDYHHAHDAYLNAVVGTALIKKYPKLESEFVYGDYKVYDVRKMIAKSEQEIGKATAKYFFYSNIMNFFKSEITLANGEIRKRPDIETNEETGEIVWDKVKDFATVKKVLSMPQVNIVKKTEVQTGGFSKESILPKRNSDKLIARKKDWDTKKYGGFDSPTVAYSVLVVADVEKGKSKKLKTVKELVGITIMERSSFEKDPIAFLEAKGYQNIQEDLIIKLPKYSLFELENGRKRLLASAGELQKGNELALPQHYVTFLYHASNYEKLKGSSEDNPQHLEYVEQHRHYFDEILDQISEFSERYILADKNLEKILELYAENEDKSINELAENFIHLFTFTSLGAPAAFKFFGTTIDRKRYTSTTEVLDATLIHQSITGLYETRIDLSQLGGD

SEQ ID NO: 262 - protein, 1368 aa, synthetic construct
MDKKYSIGLDIGTNSVGWAVITDEYKVPSKKFKVLGNTDRHSIKKNLIGALLFDSGETAEATRLKRTARRRYTRRKNRICYLQEIFSNEMAKVDDSFFHRLEESFLVEEDKKHERHPIFGNIVDEVAYHEKYPTIYHLRKKLVDSTDKADLRLIYLALAHMIKFRGHFLIEGDLNPDNSDVQKLFLQLIQAYDQTFEESPLDEEEIDAEAILTEKLSKSRRLENLLAKFPGEKKNGLFGNILKLSVGLTPNFKSNFDLEEDAKLQFSKDTYDEDLENLLGQIGDEYADLFVAAKKLYDAILLSGILTVNTEITKAPLSASMIKRYDEHHQDLTLLKALVRQQLPEKYKEIFFDQSKNGYAGYIDGGASQEEFYKFIKPILEKMDGTEELLVKLNREDLLRKQRTFDNGSIPHQIHLGELHAILRRQEDFYPFLKDNREKIEKILTFRIPYYVGPLARGNSRFAWMTRKSEETITPWNFEEVVDKGASAQSFIERMTNFDKNLPNEKVLPKHSLLYEYFTVYNELTKVKYVTEGMRKPAFLSGEQKKAIVDLLFKTNRKVTVKQLKEDYFKKIECFDSVEISGVEDRFNASLGTYHDLLKIIKDKDFLDNEENEDILEDIVLTLTLFEDREMIEERLKTYAHLFDDKVMKQLKRRRYTGWGRLSRKLINGIRDKQSGKTILDFLKSDGFANRNFMQLIHDDSLTFKEDIQKAQVSGQGDSLHEHIANLAGSPAIKKGILQTVKVVDELVKVMGRHKPENIVIEMARENQTTQKGQKNSRERMKRLEENIKELGSNILKEHPVDNTQLQNDKLYLYYLQNGKDMYTGEELDIDNLSDYDVDHIVPQSFLKDDSIDNRVLVSSKEARGKSDDVPSEAVVSKMKPFWSKLLEAKLITQRKFDNLTKAERGGLSELDKAGFIKRQLVETRQITKHVAQILDSRMNTKYDENDKLIREVKVITLKSKLVSDFRKDFQFYKVREINNYHHAHDAYLNAVVGTALIKKYPKLESEFVYGDYKVYDVRKMIAKSEQEIGKATAKYFFYSNIMNFFKTEITLANGEIRKRPLIETNGETGEIVWDKGRDFATVRKVLSMPQVNIVKKTEVQTGGFSKESILPKRNSDKLIARKKDWDPKKYGGFDSPTVAYSVLVVAKVEKGKSKKLKSVKELLGITIMERSSFEKNPIDFLEAKGYKEVKKDLIIKLPKYSLFELENGRKRMLASAGELQKGNELALPSKYVNFLYLASHYEKLKGSPEDNEQKQLFVEQHKHYLDEIIEQISEFSKRVILADANLDKVLSAYNKHRDKPIREQAENIIHLFTLTNLGAPAAFKYFDTTIDRKRYTSTKEVLDATLIHQSITGLYETRIDLSQLGGD

SEQ ID NO: 263 - protein, 1368 aa, synthetic construct
MKKKYSIGLDIGTNSVGWAVITDEYKVPSKKFKVLGNTDRHSIKKNLLGALLFDSGETAEATRLKRTARRRYTRRKNRIRYLQEIFAEEMSKVDDSFFHRLEESFLVEEDKRFERHPIFGNIVDEVAYHEKYPTIYHLRKKLADSDEKADLRLIYLALAHIIKFRGHFLIEGDLNAENSDVQKLFIQLVQTYNQLFEESPIDEEGVDAKAILTAKLSKSRRLENLIAQLPGEKKNGLFGNLIALSLGLTPNFKSNFDLAEDAKLQLSKDTYDEDLDNLLAQIGDQYADLFLAAKNLSDAILLSDILTVNSESTKAPLSASMIKRYDEHHQDLTLLKELVREQLPEKYKEIFFDESKNGYAGYIDGGASQEEFYKYIKPILEKLDGSEELLDKLNREDFLRKQRTFDNGSIPHQIHLGELHAILRRQEEFYPFLKENREKIEKILTFRIPYYVGPLARGNSRFAWMTRKSEETITPWNFEEVVDKEASAQAFIERMTNFDKNLPEEKVLPKHSLLYEYFTVYNELTKVKYVTEGMRKPEFLSGEQKEAIVDLLFKKNRKVTVKQLKEDYFKEIECFDSVEISGVEDRFNASLGTYHDLLKIIKDKDFLDNEENEDILEDIVLTLTLFEDREMIEERLKKYEHLFDKKVLKQLKRRRYTGWGRLSAKLINGIRDKQSGKTILDYLKDDGFANRNFMQLIHDDSLTFKELIQKAQVIGKGDSLHEVIANLAGSPAIKKGILQSLKIVDELVKVMGRHNPENIVIEMARENQTTQKGQKNSRERMKRIEEGIKELGSQILKEHPVENTQLQNEKLYLYYLQNGRDMYVDQELDINRLSDYDVDHIVPQSFLKDDSIDNKVLTRSDKARGKSDNVPSEEVVKKMKNYWRQLLNAKLITQRKFDNLTKAERGGLSELDKAGFIKRQLVETRQITKHVAQILDSRFNTERDENDKLIREVKIITLKSKLVSDFRKDFQFYKVREINDYHHAHDAYLNAVVGTALIKKYPKLESEFVYGDYKVYDVRKMIAKSDSEIGKATAKYFFYSNIMNFFKTEITLANGTIRKRPLIEVNEETGEIVWNKEKDFATVRKVLSMPQVNIVKKTEVQTGGFSKESILPKRNSDKLIARKKDWDPKKYGGFDSPTVAYSVLVVAKVEKGKAKKLKTVKELVGITIMERSKFEKDPIAFLESKGYKNIQKDLIIKLPKYSLFELENGRKRLLASAGELQKGNELALPNHYVTLLYLAKNYEKLKGKPEDNEQKLEYVEQHKHEFKEIFDQISEFSERYILADKNLEKLKSLYNENEDSDISELAENFIHLFTFTSLGAPAAFKFFDKDIDRKRYTSTTEVLNATLIHQSITGLYETRIDLSQLGGD

SEQ ID NO: 264 - protein, 1368 aa, synthetic construct
MKKKYSIGLDIGTNSVGWAVITDEYKVPSKKFKVLGNTDRQSIKKNLLGALLFDSGETAEATRLKRTARRRYTRRKNRICYLQEIFAEEMNKVDDSFFHRLEESFLVEEDKKHERHPIFGNIVDEVAYHEKYPTIYHLRKKLADSTEKADLRLIYLALAHIIKFRGHFLIEGDLNSENTDVQKLFIQLVQTYNQLFEENPINEEGIDAKAILSAKLSKSRRLENLIAQIPGEKKNGLFGNLIALSLGLTPNFKSNFDLSEDAKLQLSKDTYDEDLDNLLAQIGDQYADLFLAAKNLSDAILLSDILTVNSEITKAPLSASMIKRYDEHHQDLTLLKALVREQLPEKYKEIFFDKSKNGYAGYIDGGASQEEFYKYIKPILEKMDGTEELLAKINREDFLRKQRTFDNGSIPHQIHLGELHAILRRQEKFYPFLKENREKIEKILTFRIPYYVGPLARGNSRFAWMTRKSDETITPWNFEEVVDKGASAQAFIERMTNFDKNLPNEKVLPKHSLLYEYFTVYNELTKVKYVTEGMGKPEFLSAEQKEEIVDLLFKTNRKVTVKQLKEFYFKEIECFDSVEISGVEDRFNASLGTYHDLLKIIKDKDFLDNEENEDILEDIILTLTLFEDREMIEERLKKYADLFDKKVLKKLKRRRYTGWGRLSKKLINGIRDKQSGKTILDFLKDDGFANRNFMQLIHDDSLTFKEEIKKAQVIGQTDSLHETIANLAGSPAIKKGILQTVKIVDELVKVMGRHKPENIVIEMARENQTTQKGQKNSRERMKRLEEGVKELGSQILKEHPVENTQLQNEKLYLYYLQNGKDMYTGQELDIDRLSDYDVDHIIPQSFIKDDSIDNKVLTSSEEARGKSDNVPSEEVVKKMKSYWQQLLKAKLISQRKFDNLTKAERGGLSELDKAGFIKRQLVETRQITKHVAQILDSRFNTKFDENDKLIRDVKIITLKSKLVSDFRKDFGFYKVREINDYHHAHDAYLNAVVGTALIKKYPKLESEFVYGDYKVYDLRKMIGKSEKEIGKATAKMFFYSNIMNFFKSEIKLANGEIRKRPVIEVNEETGEIVWDKEKDFATVRKVLSMPQVNIVKKTEVQTGGFSKESILPKRNSDKLIARKKDWDPKKYGGFDSPTVAYSVLVVAKVEKGKSKKLKTVKELVGITIMERSSFEKNPVKFLEAKGYKNIQKDLIIKLPKYSLFELENGRKRLLASAGELQKGNELALPSKYVTFLYHASHYEKLKGKPEDNEKKREYVEQHLHYFDEIFDQISEFSKRYILADKNLEKIKSTYNKNRNYSIREQAESIINLFTFTALGAPAAFKFFDTTIDRKRYTSTKEVLDSTLIHQSITGLYETRIDLSQLGGD

SEQ ID NO: 265 - protein, 1366 aa, synthetic construct
MDKKYSIGLDIGTNSVGWAVITDDYKVPSKKMKVLGNTNKQSIKKNLLGALLFDSGETAEATRLKRTARRRYTRRKNRIRYLQEIFSSEMEKVDDSFFHRLKESFLVTEDKKNERHPIFGNIVDEVAYHENYPTIYHLRKKLADSTEKADLRLIYLAVAHMIKFRGHFLIQGDLNSDNSDVDKLFEQLVETYNELFGESPINTSGVDAKTILSARLSKSRRLENLIAQYPGEKKNGLFGNLIALSLGLTPNFKSNFDLAEDAKLQFSKDTYDDDLDGLLGQIGDQYADLFLAAKNLSDAILLSDILRVDSVVTKAPLSASMIKRYNEHHQDLALLKKLVREQFPEKYKEIFSDQSKNGYAGYIDGGASQEEFYKFIKPILEKMDETEYFLAKLNREDLLRKQRTFDNGSIPHQIHLGELHAILRRQSEHYPFLKENREKIEKILTFRIPYYVGPLARGNSRFAWMKRKSNETITPWNFSQVVDKGESAESFITRMTNFDKYLPTEKVLPKHSLLYEYYTVYNELTKVKYVTEQRKPKFFSGNVKQRIFDLLFKANRKVTVKQLLEDYKQEFYSCDSVEISGLENRFNASLGTYHDLLKIIKDKDFLDNEENQDILEDIVLTLTLFEDKEMIRERLKKYAHLFDDKVMKQLERRHYTGWGRLSKKLINGIRDKQSGKTILDYLKSDGLSNRNFMQLIHDKSLTFKERIAKANESAQTDSLEEQIAALAGSPAIKKGILQTVKVVDELVKVMGHKPENIVIEMARENQTTQEGQKNSRERMKRILTGLKELGSDILKKHPVENTQLQNDKLYLYYLQNGRDMYTGQPLDINRLSDYDVDHIVPQSFIKDNSFDNKVLTRSDEARGKSDNVPSSEVVKKMKSFWRQLLEAKLITQRKYDNLTKAERGGLSELDKAGFIKRQLVETRQITKHVAQILDSRMNTKRDKNDKPIRDVKIITLKSKLVSDFRKDFQFYKVREINNYHHAHDAYLNAVVGTALIKKYPKLESEFVYGDYKVYDVRKMIAKSEQEIGKATQKRFFYSNIMNFFKTDITLANGTIRKRPLIETNTETGEIVWDKGKDLATVRKVLSMPQVNIVKKTEVQTGGLYKESILPKREFAKLISRKKRFDSSKYGGFDSPTVAYSVLVIAKVEKGKTKKLKTVKTLVGITIMERLSFEKDPVSFLNDKGYKEVKKDKIIKLPKYSLFEFENGRRRLLASNGELQKANELVLPAKFVNFLYHAQRISTSKESENDNEKEQEYVDEHRYELQSLFSYIERFAERVILAEKNLEKLKSLFENFESKPIRSQCESFIHLFTFTNLGAPAAFKYLNTTIERKRYTSTKSILDSTLIHQSITGLYETRIDLSQLGGD

SEQ ID NO: 266 - protein, 1368 aa, synthetic construct
MDKKYSIGLDIGTNSVGWAVITDEYKVPSKKFKVLGNTDRHSIKKNLIGALLFDSGETAEATRLKRTARRRYTRRKNRICYLQEIFSNEMAKVDENFFHRLEESFLVEEDKRGERHPIFGNIVEEVAYHEKYPTIYHLRKHLADSPEKADLRLVYLALAHIIKFRGHFLIEGDLDAENTDVQKLFKELLEVYDRTFEESHLEEETVDIEAILTEKLSKSRRLENLIANFPNEKKNGLFGELLKLIVGLTPNFKSNFDLEEDAKLQFSKDTYDEDLEELLGQIGDEYADLFESAKKLYDAILLSGILTVDDNSTKAPLSASMVKRYDEHHQDLTLLKQFIRKQLPDKYKEIFFDQSKNGYAGYIDGGASQEEFYKYLKKLLEKIEGSEYFLEKIEREDFLRKQRTFDNGSIPHQIHLQELKAIIRRQGEYYPFLKENQEKIEKILTFRIPYYVGPLARGNSRFAWLSRKSDETITPWNFDEIVDKEKSAEAFITRMTNFDKNLPDEKVLPKHSLLYEKFTVYNELTKVKYVTEQGKKPEFFDANMKQEIFEGVFKKYRKVTKKQLLDYLKKEFDEFRIVDISGVEDRFNASLGTYHDLKKILFDKEFLDDPANEKILEDIILTLTLFEDREMIKKRLEKYSDLLTKEQLKKLERRRYTGWGRLSAKLINGIRDKETGKTILDYLIDDGYANRNFMQLIHDDNLSFKEEIAKAQVIGETDSLHEHIANLAGSPAIKKGILQTVKVVDELVKVMGRHKPENIVIEMARENQTTQKGQKNSRERMKRIEEGIKELGSQILKEHPVENTQLQNEKLYLYYLQNGRDMYVDQELDINRLSDYDVDHIVPQSFLKDDSIDNKVLTRSDKARGKSDNVPSEEVVKKMKNYWRQLLNAKLITQRKFDNLTKAERGGLSELDKAGFIKRQLVETRQITKHVAQILDSRMNTKYDENDKLIREVKVITLKSKLVSDFRKDFQFYKVREINNYHHAHDAYLNAVVGTALIKKYPKLESEFVYGDYKVYDVRKMIAKSEQEIGKATAKYFFYSNIMNFFKTEITLANGEIRKRPLIETNGETGEIVWDKGRDFATVRKVLSMPQVNIVKKTEVQTGGFSKESILPKRDSDKLIARKKDWDTKKYGGFDSPTVAYSVLVIADIEKGKAKKLKTVKELVGITIMERSKFEKDPVAFLEDKGYQNIQEDNLIKLPKYSLFELENGRKRLLASAGELQKGNELALPNHYVTLLYHAKNYEKVKGKEEDIEEHLIYVEEHRDEFKELLDQVKEFSERYILADANIEKLKKLYEKNDSASIEELAENFIHLLTFTALGAPAAFKFFGKSIDRKRYTSTKEILNATLIHQSITGLYETRIDLSKLGGD

SEQ ID NO: 267 - protein, 1368 aa, synthetic construct
MKKPYSIGLDIGTNSVGWAVVTDDYKVPSKKMKVLGNTDRSSIKKNLLGALLFDSGETAEATRLKRTARRRYTRRKNRILYLQEIFAEEMNKVDDSFFHRLEDSFLVEEDKRGERHPIFGNIVEEVAYHEKFPTIYHLRKHLADSTEKADLRLVYLALAHIIKFRGHFLIEGDLNIENTDVQKLFKKFVEVYDRTFEESHLSEETVDAESILTEKVSKSRRLENLIKLFPNEKKNGLFGNLIALSLGLQPNFKTNFKLSEDAKLQFSKDTYEEDLENLLGQIGDEYADLFIAAKNLYDAILLSGILTVNDSSTKAPLSASMIKRYEEHHEDLTKLKAFIRKQLPEKYKEIFFDETKNGYAGYIDGGTKQEEFYKYLKKLLSKIDGSEYFLDKIEREDFLRKQRTFDNGSIPHQIHLQELHAILRRQAEYYPFLKENQEKIEKILTFRIPYYVGPLARGNSRFAWASRKSDETITPWNFDEVIDKEASAEAFIERMTNNDLYLPEEKVLPKHSLLYEKFTVYNELTKVKYVTEQMGKAKFFDANMKQEIFDGLFKKYRKVTKKKLLDFLDKEFDEFRIVDISGVEKAFNASLGTYHDLLKIIKDKDFLDNEENEDILEDIVLTLTLFEDREMIRKRLSKYEDLFTKKQLKKLERRHYTGWGRLSAKLINGIRDKQTGKTILDYLIDDGHANRNFMQLIHDDNLSFKEEIAKAQVIGETDSLHEVVAELAGSPAIKKGILQSLKIVDELVKVMGRYNPENIVVEMARENQTTNKGQRNSRERLKRLEEAIKELGSKILKEHPVENQQLQNDRLYLYYLQNGKDMYTGEELDIDKLSQYDVDHIIPQSFIKDDSIDNRVLTSSAKARGKSDDVPSIEVVRKMKSFWSKLLNAKLISQRKFDNLTKAERGGLTEDDKAGFIKRQLVETRQITKHVAQILDERFNTEFDENNKLIRDVKIITLKSKLVSQFRKEFELYKVREINDYHHAHDAYLNAVVGTALIKKYPKLEPEFVYGDYPKYNSYKLIAKSDKERGKATAKMFFYSNIMNFFKTKVKLADGQVIERPVIEVNEETGEIVWDKTKHIATVKKVLSMPQVNIVKKTEVQTGGFSKESILPKRDSDKLIARKKKWDTKKYGGFDSPTVAYSVLVVADIEKGKAKKLKTVKELVGITIMERSAFEKNPVAFLEDKGYQNIQEEKIIKLPKYSLFELENGRKRLLASAGELQKGNELALPNKLVTLLYHAKRIEKLDEKPEDIEKHLEYVEAHKDEFKELLNQISEFSERYILADKNLEKIEELYEKNDEASIEELASSFINLLTFTALGAPADFKFFGKNIDRKRYTSTKEILNATLIHQSITGLYETRIDLSKLGGD

SEQ ID NO: 268 - protein, 1368 aa, synthetic construct
MKKPYSIGLDIGTNSVGWAVITDDYKVPAKKMKVLGNTDKSHIKKNLLGALLFDSGNTAEDRRLKRTARRRYTRRRNRILYLQEIFSEEMAKVDESFFHRLEDSFLVPEDKRGERHPIFGNIAEEVAYHKQFPTIYHLRKHLADSSEKADLRLVYLALAHIIKFRGHFLIEGKLDSENTDVQHLFKAFVEVYDNTFEESHLSEQTVDAEEILTEKISKSRRLERLLKLFPNEKKNGLFGNFLALIVGLQPNFKSNFELSEDAKLQFSKDTYEEDLEGLLGQIGDEYADLFVAAKNLYDAILLSGILTVKDVSTKAPLSASMVKRYEEHQADLALLKKFIKQNLPDKYKEVFSDVSKNGYAGYIDGKTSQEDFYKYLKNLLSKVEGSDYFLDKIEREDFLRKQRTFDNGSIPHQIHLQEMHAILRRQGEYYPFLKENQEKIEKILTFRIPYYVGPLARGNSRFAWASRKSDEKITPWNFDEIVDKESSAEAFIERMTNYDLYLPNEKVLPKHSLLYEKFTVYNELTKVKYITEQFGKYEFFDANMKQEIFDGVFKEERKVTKDKLKEFLDKEFDEFRIVDLTGLDKAFNASLGTYHDLLKIIKDKDFLDNSENEKILEDIVLTLTLFEDREMIRKRLQKYSDLFTKEQLKKLERRHYTGWGRLSAKLINGIRDKQSNKTILDYLIDDGKSNRNFMQLINDDSLSFKEEIAKAQVIGETDNLHQVVSDLAGSPAIKKGILQSLKIVDELVKVMGRYNPENIVVEMARENQTTNKGRRNSQQRLKRLTDSIKELGSKILKEHPVDNSQLQNDRLFLYYLQNGRDMYTGEELDIDRLSQYDIDHIIPQAFIKDDSIDNRVLTSSAKARGKSDDVPSEEVVKKMKSFWSKLLSAKLISQRKFDNLTKAERGGLTDDDKAGFIKRQLVETRQITKHVARILDERFNTEFDENNKKIRKVKIVTLKSNLVSQFRKEFELYKVREINDYHHAHDAYLNAVVGKALLKKYPKLEPEFVYGEYPKYNSYKLNGKSANERNKATAKMFFYSNIMNFFKSDIKLADGEIVERPQIEANDETGEIAWDKTKHFATVRKVLSYPQVNIVKKVEEQTGGFSKESILPKGDSDKLIPRKTKWDTKKYGGFDSPIVAYSVLVIADIEKGKSKKLKTVKELVGITIMEKHPFEKNPVAFLERKGYRNIQEENIIKLPKYSLFELENGRRRLLASARELQKGNEAVLPNHLVTLLYHAKNIHKIDEKEEPFPKHLEYVEKHRDEFLELLDIIESFSKKYVLAEKNLEKIEELYEKNNEKDIEELASSFINLLTFTALGAPAAFKFFDKNIDRKRYTSTAECLNATLIHQSITGLYETRIDLSKLGGD

SEQ ID NO: 269 - protein, 1368 aa, synthetic construct
MDKKYSIGLDIGTNSVGWAVITDEYKVPSKKFKVLGNTDRHSIKKNLLGALLFDSGETAEATRLKRTARRRYTRRKNRIRYLQEIFAEEMSKVDDSFFQRLEESFLVEEDKRFERHPIFGNIVDEVAYHEEYPTIYHLRKHLADSDEKADLRLIYLALAHIIKFRGHFLIEGPLNSENSDVQKLFIQFVETYNQLFEESPLEEEGVDIKAILTAKLSKSRRLENLIANLPNEKKNGLFGNLLALSLGLTPNFKSNFELSEDAKLQFSKDTYDEDLENLLAQIGDQYADLFIAAKNLSDAILLSGILTVKTEITKAPLSASMIKRYDEHHQDLTLLKALVREQLPEKYKEIFFDQTKNGYAGYIDGGASQEDFYKYIKNILEKLDGSEYFLDKINREDFLRKQRTFDNGSIPHQIHLQELRAILRRQEEFYPFLKENQEKIEKILTFRIPYYVGPLARGNSRFAWMKRKSEETITPWNFEEVVDKEASAQLFIERMTNFDKNLPNEKVLPKHSLLYEKFTVYNELTKVKYVTEGMRKPAFFSAGQKEEIVDLLFKKNRKVTVKQLKEYLFKKIECFDSVEISGVEDKFNASLGTYHDLLKIIKDKDFLDNEENEDILEDIVLTLTLFEDREMIEKRLAKYAHLFDKKVLKKLKRRRYTGWGRLSAKLINGIRDKQTGKTILDYLIDDGFANRNFMQLIHDDSLTFKEEIKKAQVIGQGDSLHEVIANLAGSPAIKKGILQSLKIVDELVKVMGRHSPENIVIEMARENQTTQKGQKNSRERLKRLEEVIKKLGSKILKEHPVDNTQLQNDKLYLYYLQNGRDMYTGQELDIDRLSDYDVDHIIPQSFIKDDSIDNRVLTSSGKARGKSDDVPSEEVVKKMKNFWRQLLNSKLISQRKFDNLTKAERGGLTELDKAGFIKRQLVETRQITKHVAQILDSRFNTKYDENDKLIREVKIITLKSKLVSDFRKDFGFYKVREINDYHHAHDAYLNAVVGTALIKKYPKLESEFVYGDYKVYNVRKMIAKSEQEIGKATAKYFFYSNIMNFFKSDVTLANGEIRKRPLIETNEETGEIVWDKTKDIATVKKVLSMPQVNIVKKTEVQTGGFSKESILPKRNSDKLIARKKDWDTKKYGGFDSPTVAYSVLVVADVEKGKAKKLKTVKELVGITIMERSAFEKDPVGFLEDKGYQNIQKDLIIKLPKYSLFELENGRKRLLASAGELQKGNELALPQKYVTLLYHAKNYEKLKGSPEDNEKHLEYVEQHRHEFDEILNQIIEFSERYILADKNLEKIEELYKENNDSPIEELASSFLNLFTFTSLGAPAAFKFFGTDIDRKRYTSTTEILNATLIHQSITGLYETRIDLSQLGGD

SEQ ID NO: 270 - protein, 1368 aa, synthetic construct
MDKPYSIGLDIGTNSVGWAVITDEYKVPSKKFKVLGNTDRHSIKKNLIGALLFDSGETAEATRLKRTARRRYTRRKNRIRYLQEIFAEEMNKVDDSFFHRLEESFLVEEDKRGERHPIFGNIVDEVAYHEKYPTIYHLRKHLADSPEKADLRLIYLALAHIIKFRGHFLIEGDLKAENTDVQKLFEDLVQTYNNTFEESALSEELVDAFAILTAKVSKSRRLENLIKDYPNEKKNGLFGNLIALSLGLTPNFKTNFELSEDAKLQFSKDTYDEDLENLLGQIGDQYADLFLAAKNLYDAILLSGILTVKTEITKAPLSASMVKRYDEHHQDLTLLKQFIRQNLPEKYKEIFFDKSKNGYAGYIDGGASQEEFYKYIKKILEKIDGSEYFLDKIEREDFLRKQRTFDNGSIPHQIHLQELKAILRRQEKFYPFLKENQEKIEKILTFRIPYYVGPLARGNSRFAWLSRKSDETITPWNFEEIVDKEASAQAFIERMTNYDKNLPEEKVLPKHSLLYEKFTVYNELTKVKYVTEGMRKPAFLDAGQKQEIVDLLFKKNRKVTVKQLKEFLFKEIDCFDIVEISGVEDRFNASLGTYHDLLKIIKDKDFLDNEENEEILEDIVLTLTLFEDREMIEERLSKYADLFDKKVLKKLERRRYTGWGRLSAKLINGIRDKQSGKTILDYLIDDGFANRNFMQLIHDDSLSFKEEIQKAQVIGQTDSLHEVIANLAGSPAIKKGILQSIKIVDELVKVMGRHEPENIVVEMARENQTTQKGQKNSRERLKRLEEAHKKLGSNILKEHPVENTQLQNDKLYLYYLQNGKDMYTGEELDIDRLSDYDVDHIIPQSFIKDDSIDNRVLTSSKKARGKSDNVPSEDVVKKMKNFWEKLLNAKLISQRKFDNLTKAERGGLTELDKAGFIKRQLVETRQITKHVAQILDSRFNTKYDENDKLIRNVKIITLKSKLVSDFRKEFGFYKVREINDYHHAHDAYLNAVVGTALIKKYPKLESEFVYGDYKVYNLYKMIAKSEQEIGKATAKYFFYSNIMNFFKQEITLANGEIRKRPLIETNEETGEIVWDKAKDFATVRKVLSMPQVNIVKKTEVQTGGFSKESILPKRDSDKLIARKKDWDTKKYGGFDSPTVAYSVLVVADIEKGKAKKLKTVKELVGITIMERSSFEKDPIAFLEDKGYKNIQKENIIKLPKYSLFELENGRKRLLASAGELQKGNELALPQKYVTLLYHAHHYEKLKGSPEDNEKHLEYVEQHRHEFDEILEQIIEFSERYILADKNLEKIQELYTKNSNADINELAESFINLLTFTALGAPAAFKFFGKDIDRKRYTSTTEILNATLIHQSITGLYETRIDLSQLGGD

SEQ ID NO: 271 - protein, 1368 aa, synthetic construct
MKKKYSIGLDIGTNSVGWAVITDEYKVPSKKFKVLGNTDRQSIKKNLIGALLFDSGETAEATRLKRTARRRYTRRKNRIRYLQEIFAEEMNKVDDSFFHRLEESFLVEEDKRGERHPIFGNIVDEVAYHEKYPTIYHLRKKLVDSTEKADLRLIYLALAHMIKFRGHFLIEGDLNSENSDVQKLFIDLVQTYNQIFEESHLSESGVDAKAILTEKLSKSRRLENLIAQFPNEKKNGLFGNLIALSLGLTPNFKSNFNLSEDAKLQFSKDTYDEDLENLLGQIGDEYADLFLAAKNLSDAILLSGILRVDDESTKAPLSASMIKRYDEHHQDLTLLKALVRKQLPEKYKEIFFDKSKNGYAGYIDGGASQEEFYKYIKPILEKMDGTEYLLEKLEREDLLRKQRTFDNGSIPHQIHLQELHAILRRQEEYYPFLKENQEKIEKILTFRIPYYVGPLARGNSRFAWMTRKSEETITPWNFEEVVDKGASAQAFIERMTNFDKNLPEEKVLPKHSLLYEYFTVYNELTKVKYVTEGMGKAEFLDANVKKEIVDGLFKKNRKVTVKKLKDFYFKEFDEFRIVDISGVEDRFNASLGTYHDLLKIIKDKEFLDNEENEDILEDIVLTLTLFEDREMIEKRLEKYANLFDKKQMKKLKRRRYTGWGRLSKKLINGIRDKQSGKTILDFLIDDGFANRNFMQLIHDDSLTFKDEIKKAQVIGQSDSLHEQIADLAGSPAIKKGILQTVKVVDELVKVMGRHKPENIVIEMARENQTTQKGQRNSRERLKRIEEGIKELGSQILKEHPVENTQLQNDKLYLYYLQNGRDMYTGEELDIDRLSDYDVDHIVPQSFIKDDSIDNKVLTRSKKARGKSDDVPSEEVVKKMKSYWRQLLKAKLITQRKFDNLTKAERGGLTELDKAGFIKRQLVETRQITKHVAQILDSRMNTERDENDKLIRDVKVITLKSKLVSDFRKDFQFYKVREINDYHHAHDAYLNAVVGTALIKKYPKLESEFVYGDYPVYNSRKMIAKSEQEIGKATAKYFFYSNIMNFFKTEITLANGEIRKRPLIETNGETGEIVWDKGRDFATVRKVLSMPQVNIVKKTEVQTGGFSKESILPKRNSDKLIARKKDWDPKKYGGFDSPTVAYSVLVVAKVEKGKSKKLKSVKELLGITIMERSSFEKNPIDFLEAKGYKEVKKDLIIKLPKYSLFELENGRKRMLASAGELQKGNELALPSKYVNFLYLASHYEKLKGSPEDNEQKQLFVEQHKHYLDEIIEQISEFSKRVILADANLDKVLSAYNKHRDKPIREQAENIIHLFTLTNLGAPAAFKYFDTTIDRKRYTSTKEVLDATLIHQSITGLYETRIDLSQLGGD

SEQ ID NO: 272 - protein, 1368 aa, synthetic construct
MKKPYSIGLDIGTNSVGWAVVTDDYKVPAKKMKVLGNTDKSHIKKNLLGALLFDSGNTAEDRRLKRTARRRYTRRRNRILYLQEIFSEEMGKVDDSFFHRLEDSFLVTEDKRGERHPIFGNLEEEVAYHENFPTIYHLRKYLADNPEKADLRLVYLALAHIIKFRGHFLIEGKLDTRNNDVQRLFQEFLAVYDNTFENSSLQEQNVQVEEILTDKISKSAKKDRVLKLFPNEKSNGRFAEFLKLIVGNQADFKKHFELEEKAPLQFSKDTYEEDLEVLLAQIGDEYAELFLSAKKLYDSILLSGILTVTDVSTKAPLSASMIKRYNEHQMDLAQLKQFIRQKLPDKYNEVFSDVSKDGYAGYIDGKTNQEAFYKYLKKLLNKIEGSGYFLDKIEREDFLRKQRTFDNGSIPHQIHLQEMRAIIRRQAEFYPFLKENQDKIEKILTFRIPYYVGPLARGKSDFAWLSRKSADKITPWNFDEIVDKESSAEAFINRMTNYDLYLPNEKVLPKHSLLYEKFTVYNELTKVKYKTEQMGKTAFFDANMKQEIFDGVFKVYRKVTKDKLMDFLEKEFDEFRIVDLTGLDKAFNASYGTYHDLRKILKDKDFLDNSKNEKILEDIVLTLTLFEDREMIRKRLENYSDLLTKEQLKKLERRHYTGWGRLSAKLIHGIRNKESRKTILDYLIDDGNSNRNFMQLINDDALSFKEEIAKAQVIGETDNLNQVVSDIAGSPAIKKGILQSLKIVDELVKIMGGHQPENIVVEMARENQFTNQGRRNSQQRLKGLTDSIKELGSQILKEHPVENSQLQNDRLFLYYLQNGRDMYTGEELDIDYLSQYDIDHIIPQAFIKDDSIDNRVLTSSAEARGKSDDVPSKDVVKKMKSYWSKLLSAKLITQRKFDNLTKAERGGLTDDDKAGFIKRQLVETRQITKHVARILDERFNTETDENNKKIRQVKIVTLKSNLVSNFRKEFELYKVREINDYHHAHDAYLNAVVGKALLKKYPKLEPEFVYGDYPKFNSHKIVSESKEEENKATAKKFFYSNIMNFFKKDVKLADGQIVERPMIERNDENGEIVWDKDKHISNVKKVLSYPQVNIVKKVEEQTGGFSKESILPKGNSDKLIPRKTKWDTKKYGGFDSPIVAYSVLVIADIEKGKSKKLKTVKELVGITIMEKMTFEKNPVAFLERKGYQNIQEENIIKLPKYSLFELENGRKRLLASAKELQKGNEIVLPNHLVTLLYHAKNIHKIDEKTEDIPKHLEYVEKHKDEFKELLDVVSNFSKKYTLAEGNLEKILELYAQNNSADIEELASSFINLLTFTALGAPATFKFFDKNIDRKRYTSTTEILNATLIHQSITGLYETRIDLSKLGGD

SEQ ID NO: 273 - protein, 1368 aa, synthetic construct
MKKPYSIGLDIGTNSVGWAVVTDDYKVPAKKMKVLGNTDKSHIKKNLLGALLFDSGNTAEDRRLKRTARRRYTRRRNRILYLQEIFSEEMGKVDDSFFHRLEDSFLVPEDKRGERHPIFGNLEEEVKYHENFPTIYHLRKYLADNPEKADLRLVYLALAHIIKFRGHFLIEGKFDTRNNDVQRLFQEFLAVYDNTFENSSLQEQNVQVEEILTDKISKSAKKDRVLKLFPNEKSNGRFAEFLKLIVGNQADFKKHFELEEKAPLQFSKDTYEEDLEVLLGQIGDDYAELFLSAKKLYDSILLSGILTVTDVSTKAPLSASMIKRYNEHQMDLTQLKQFIRQKLSDKYNEVFSDVSKDGYAGYIDGKTSQEAFYKYLKKLLNKIEGSEYFLDKIEREDFLRKQRTFDNGSIPHQIHLQEMRAIIRRQAEFYPFLAENQDKIEKILTFRIPYYVGPLARGKSDFAWLSRKSAEKITPWNFDEIVDKESSAEAFINRMTNYDLYLPNEKVLPKHSLLYEKFTVYNELTKVKYKTEQMGKTAFFDANMKQEIFDGVFKVYRKVTKDKLMDFLEKEFDEFRIVDLTGLDKAFNASLGTYHDLLKILNDKDFLDNSKNEKILEDIVLTLTLFEDREMIRKRLENYSDLLTKEQLKKLERRHYTGWGRLSAKLIHGIRNKESRKTILDYLIDDGNSNRNFMQLINDDALSFKEEIAKAQVIGETDNLNQVVSDLAGSPAIKKGILQSLKIVDELVKIMGTHQPENIVVEMARENQFTNQGRRNSQQRLKGLTDSIKELGSQILKEHPVENSQLQNDRLFLYYLQNGRDMYTGEELDIDYLSQYDIDHIIPQAFIKDNSIDNRVLVSSKEARGKSDDVPSKDVVRKMKSYWSKLLSAKLISQRKFDNLTKAERGGLTDDDKAGFIKRQLVETRQITKHVARILDERFNTETDENNKKIRQVKIVTLKSNLVSNFRKEFELYKVREINDYHHAHDAYLNAVVGKALLGKYPQLEPEFVYGEYPKFNSHKFVRKSDKEENKATAKKFFYSNIMNFFKKDIKLADGSIVERPVVERNDETGEIIWDKDKHISNVKKVLSYPQVNIVKKVEEQTGGFSKESILPKGNSDKLIPRKTKWDTKKYGGFDSPIVAYSILVIADIEKGKSKKLKTVKELVGITIMEKMTFERDPVAFLERKGYRNIQEENIIKLPKYSLFELENGRKRLLASARELQKGNEIVLPNHLGTLLYHAKNIHKVDEKEEEIPKHLEYVDKHRDEFKELLDVVSNFSKKYILAEGNLEKIKELYAQNNSESIEELASSFINLLTFTAIGAPAAFKFFDKNIDRKRYTSTTEILNATLIHQSITGLYETRIDLSKLGGD

SEQ ID NO: 274 - protein, 1368 aa, synthetic construct
MKKKYSIGLDIGTNSVGWAVITDEYKVPSKKFKVLGNTDRKSIKKNLLGALLFDSGETAEATRLKRTARRRYTRRKNRIRYLQEIFAEEMAKVDDSFFHRLEESFLVEEDKKHERHPIFGNIVDEVAYHEKYPTIYHLRKKLADSTEKADLRLIYLALAHIIKFRGHFLIEGDLNSDNSDVQKLFIQLVQTYNQLFEENPINEEEVDAKAILSAKLSKSRRLENLIAQFPNEKKNGLFGNLIALSLGLTPNFKSNFDLAEDAKLQLSKDTYDEDLENLLAQIGDQYADLFLAAKNLSDAILLSDILTVNDESTKAPLSASMIKRYDEHHQDLTLLKNLVRQQLPEKYKEIFFDKSKNGYAGYIDGGASQEEFYKYIKPILEKLDGTEEFLAKINREDFLRKQRTFDNGSIPHQIHLNELHAILRRQEDFYPFLKENQEKIEKILTFRIPYYVGPLARGNSRFAWLTRKSDETITPWNFEEVVDKGASAQAFIERMTNFDKNLPEEKVLPKHSLLYEYFTVYNELTKVKYITEGMRKPEFLSSEQKEAIVDLLFKKNRKVTVKQLKEDYFKKIECFDSVEISGVEDRFNASLGTYHDLLKIIKDKDFLDNEENEDILEDIILTLTLFEDREMIEERLKKYAHLFDKKVLKQLKRRRYTGWGRLSRKLINGIRDKQSGKTILDFLKSDGFANRNFMQLIHDDSLTFKEEIQKAQVSGQGDSLHEQIANLAGSPAIKKGILQSLKIVDELVKVMGRHNPENIVIEMARENQTTQKGQKNSRERMKRIEEGIKELGSQILKEHPVENTQLQNEKLYLYYLQNGRDMYVDQELDINRLSDYDVDHIVPQSFLKDDSIDNKVLTRSDKARGKSDNVPSEEVVKKMKNYWRQLLNAKLITQRKFDNLTKAERGGLSELDKAGFIKRQLVETRQITKHVAQILDSRFNTERDENNKLIRDVKIITLKSKLVSDFRKDFGLYKVREINDYHHAHDAYLNAVVGTALIKKYPKLESEFVYGDYKVYDVRKMIAKSEQEIGKATAKYFFYSNIMNFFKSEVTLANGTIRKRPKIETNEETGEIVWDKEKDFATVKKVLSMPQVNIVKKTEVQTGGFSKESILPKRNSDKLIARKKDWDTKKYGGFDSPTVAYSVLVVAKVEKGKAKKLKTVKELVGITIMERSSFEKDPIAFLEAKGYQDIREELIIKLPKYSLFELENGRKRMLASAGELQKGNELALPNHYVTLLYHASHYEKLKGKSEDIEHKREYVEQHRHEFDEIFEQISEFSERYILADKNLEKIKSLFDENTDKDIRELAENFIHLFTFTALGAPAAFKFFDTTIDRKRYTSTTEILDATLIHQSITGLYETRIDLSKLGGD

SEQ ID NO: 275 - protein, 1368 aa, synthetic construct
MKKPYSIGLDIGTNSVGWAVITDEYKVPSKKFKVLGNTDRQSIKKNLLGALLFDSGETAEATRLKRTARRRYTRRKNRIRYLQEIFAEEMSKVDDSFFHRLEESFLVEEDKDDERHPIFGNIVDEVAYHENYPTIYHLRKHLADSTEKADLRLIYLALAHIIKFRGHFLIEGDLNSENTDVQKLFIKLVQTYNQTFEENPLSEAEIDAKAILTAKLSKSRRLENLLAKFPNEKRNGLFGNLLALSLGLTPNFKSNFELSEDAKLQISKDTYDEDLENLLAQIGDQYADLFVAAKNLYDAILLSGILTVNDESTKAPLSASMIKRYDEHHQDLTLLKKLVRKQLPEKYKEIFFDESKNGYAGYIDGGASQEEFYKYIKPILSKLDGSEYFLDKIEREDFLRKQRTFDNGSIPHQIHLNELHAILRRQEDYYPFLKENREKIEKILTFRIPYYVGPLARGNSRFAWAKRKSDETITPWNFEEVVDKEASAQAFIERMTNYDKNLPEEKVLPKHSLLYEKFTVYNELTKVKYITEGMKKPEFFSAEQKKEIVDLLFKKNRKVTVKKLKEFLFKKVECFDSVELSGVEDAFNASLGTYHDLLKILKDKDFLDNEANEDILEDIVLTLTLFEDREMIEQRLLKYADLFDKKVLKKLKRRRYTGWGRLSAKLINGIRDKQSGKTILDYLIDDGFANRNFMQLIHDDSLSFKEEIKKAQVIGQTDSLHEVIANLAGSPAIKKGILQSLKIVDELVKVMGRHKPENIVIEMARENQTTQKGQKNSRERMKRIEEGIKELGSQILKEHPVENTQLQNEKLYLYYLQNGRDMYVDQELDINRLSDYDVDHIVPQSFLKDDSIDNKVLTRSDKARGKSDNVPSEEVVKKMKNYWRQLLNAKLITQRKFDNLTKAERGGLSELDKAGFIKRQLVETRQITKHVAQILDSRFNTEFDENDKLIREVKIITLKSKLVSDFRKDFGFYKVREINDYHHAHDAYLNAVVGTALIKKYPKLESEFVYGDYKVYNVRKLIGKSDKEIGKATAKYFFYSNIMNFFKTEITLANGTIRKRPLIETNEETGEIVWDKEKDFATVKKVLSMPQVNIVKKTEVQTGGFSKESILPKRDSDKLIARKKDWDTKKYGGFDSPTVAYSVLVVADVEKGKAKKLKTVKELVGITIMERSSFEKDPIAFLEDKGYHNIRKDNMIKLPKYSLFELENGRKRLLASAGELQKGNELALPQKYVTLLYLASHYEKGKGKSEDKSNKLEFVKQHRHEFDEIFDQIEEFSKRYILADKNLEKILEAYKENEEFSISELAENFIHLFTFTSLGAPAAFKFFGKDIDRKRYTSTTEILNATLIHQSITGLYETRIDLSKLGGD

SEQ ID NO: 276 - protein, 1368 aa, synthetic construct
MDKPYSIGLDIGTNSVGWAVITDEYKVPSKKFKVLGNTDRHSIKKNLLGALLFDSGETAEATRLKRTARRRYTRRKNRILYLQEIFAEEMSKVDDSFFHRLEESFLVEEDKRHDRHPIFGNIVEEVAYHENYPTIYHLRKKLADSTEKADLRLVYLALAHIIKFRGHFLIEGDLNSENTDVQKLFEKLVQTYDQTFEESHLSEETVDAKEILTDKVSKSRRLENLIKQFPNEKKNGLFGNLIALSLGLQPNFKTNFDLSEDAKLQFSKDTYDEDLENLLGQIGDDYADLFAAAKNLYDAILLSGILTVDTEITKAPLSASMIKRYDEHHQDLTLLKKFIRQNLPEKYKEIFFDESKNGYAGYIDGGAKQEEFYKYIKNILNKIDGSEYFLAKINREDFLRKQRTFDNGSIPHQIHLQELKAILRRQGDYYPFLKENREKIEKILTFRIPYYVGPLARGNSRFAWLKRKSDETITPWNFEEVVDKEASAQAFIERMTNYDKNLPEEKVLPKHSLLYEKFTVYNELTKVKYVTEGMRKPAFFDANQKQEIVDLLFKTNRKVTVKKLKEFLFKEFEEFDIVEISGVEKSFNASLGTYHDLLKIIKDKDFLDNPENEEILEDIVLTLTLFEDREMIEERLSKYAHLFDKKVLKKLERRRYTGWGRLSAKLINGIRDKQSGKTILDYLIDDGFANRNFMQLIHDDSLDFKEEIAKAQVIGETDSLHETIANLAGSPAIKKGILQSLKIVDELVKVMGRHAPENIVIEMARENQTTQKGQRNSRERLKRLEEAIKNLGSKILKEHPVENTQLQNDKLYLYYLQNGKDMYTGEELDIDRLSDYDVDHIIPQSFIKDDSIDNRVLTSSAEARGKSDDVPSEEVVKKMKSFWHKLLKSKLISQRKFDNLTKAERGGLSELDKAGFIKRQLVETRQITKHVAQILDSRFNTKYDENDKLIRDVKIITLKSKLVSDFRKDFQLYKVREINDYHHAHDAYLNAVVGTALIKKYPKLESEFVYGDYPVYNSYKMIAKSEQEIGKATAKYFFYSNIMNFFKKDVTLANGEIRKRPLIETNEETGEIVWDKEKDFATVRKVMSMPQVNIVKKTEVQTGGFSKESILPKRNSDKLIARKKDWDTKKYGGFDSPTVAYSVLVVADIEKGKVKKLKTVKELVGITIMERSSFEKDPVAFLENKGYQNIQKENIIKLPKYSLFELENGRKRLLASAGELQKGNELALPNHYVTLLYHAKNYEKLKESPEDNEKHLEYVEQHRDEFDELLDQISEFSERYILADKNLEKILELYSQNENSDIEELASSFINLLTFTALGAPAAFKFFGKEIDRKRYTSTTEILNATLIHQSITGLYETRIDLSQLGGD

SEQ ID NO: 277 - protein, 1368 aa, synthetic construct
MDKKYSIGLDIGTNSVGWAVITDEYKVPSKKFKVLGNTDRHSIKKNLIGALLFDSGETAEATRLKRTARRRYTRRKNRIRYLQEIFSNEMAKVDDSFFHRLEESFLVEEDKKHERHPIFGNIVDEVAYHEKYPTIYHLRKKLADSDEKADLRLIYLALAHMIKFRGHFLIEGDLNSDNSDVDKLFKQLVQTYNQLFEENPINEEGVDAKAILSARLSKSRRLENLIAQFPGEKKNGLFGNLIALSLGLTPNFKSNFDLAEDAKLQLSKDTYDEDLENLLAQIGDQYADLFLAAKNLSDAILLSDILTVNSEITKAPLSASMVKRYDEHHQDLTLLKALVRQQLPEKYKEIFFDQSKNGYAGYIDGGASQEEFYKYIKPILEKLDGTEELLDKIEREDFLRKQRTFDNGSIPHQIHLGELHAILRRQEKYYPFLKENREKIEKILTFRIPYYVGPLARGNSRFAWMTRKSDETITPWNFEEVVDKGASAQSFIERMTNFDKNLPNEKVLPKHSLLYEKFTVYNELTKVKYVTEGMRKPEFLSGEQKQEIVDLLFKKNRKVTVKQLKEYYFKKIECFDSVEISGVEDRFNASLGTYHDLLKIIKDKDFLDNEENEDILEDIVLTLTLFEDREMIEERLKKYADLFDKKVLKQLKRRRYTGWGRLSRKLINGIRDKQSGKTILDFLKSDGFANRNFMQLIHDDSLTFKEEIEKAQVSGQGDSLHEQIANLAGSPAIKKGILQSLKIVDELVKVMGRHKPENIVIEMARENQTTQKGQKNSRERMKRLEEAIKELGSNILKEHPVENTQLQNEKLYLYYLQNGKDMYTGEELDIDRLSDYDVDHIVPQSFLKDDSIDNKVLTSSAKARGKSDNVPSEEVVKKMKNYWKQLLDAKLITQRKFDNLTKAERGGLTELDKAGFIKRQLVETRQITKHVAQILDSRFNTKYDENDKLIRDVKIITLKSKLVSDFRKDFQFYKVREINNYHHAHDAYLNAVVGTALIKKYPKLESEFVYGDYKVYDVRKMIAKSEQEIGKATAKYFFYSNIMNFFKTEITLANGEIRKRPLIETNGETGEIVWDKEKDFATVRKVLSMPQVNIVKKTEVQTGGFSKESILPKRDSDKLIARKKDWDTKKYGGFDSPTVAYSVLVVAKVEKGKAKKLKTVKELVGITIMERSSFEKNPIDFLEAKGYKEVQKDLIIKLPKYSLFELENGRKRMLASAGELQKGNELALPSKYVEFLYLASHYEKLKGSPEDNEQKQLFVEQHKEYFDEIIEQISEFSKRYILADANLEKIKSLYEKNRDKPIEEQAESFINLLTFTALGAPAAFKFFDTTIDRKRYTSTKEILNATLIHQSITGLYETRIDLSQLGGD

SEQ ID NO: 278 - protein, 1368 aa, synthetic construct
MKKKYSIGLDIGTNSVGWAVITDEYKVPSKKFKVLGNTDRQSIKKNLIGALLFDSGETAEATRLKRTARRRYTRRKNRIRYLQEIFAEEMSKVDDSFFHRLEESFLVEEDKKNERHPIFGNIVDEVAYHEKYPTIYHLRKKLADSTEKADLRLIYLALAHIIKFRGHFLIEGDLNSENSDVQKLFKQLVQTYNQLFEENPLNESGVDAKAILTAKLSKSRRLENLIAQFPGEKKNGLFGNLIALSLGLTPNFKSNFDLAEDAKLQLSKDTYDDDLENLLAQIGDQYADLFLAAKNLSDAILLSDILTVNDESTKAPLSASMIKRYDEHHQDLTLLKALVRQQLPEKYKEIFFDDSKNGYAGYIDGGASQEDFYKFIKPILEKMDGSEDFLAKLNREDFLRKQRTFDNGSIPHQIHLDELHAILRRQEEFYPFLKENREKIEKILTFRIPYYVGPLARGNSRFAWMTRKSEETITPWNFEEVVDKEASAQAFIERMTNFDKNLPNEKVLPKHSLLYEYFTVYNELTKVKYVTEGMRKPEFLSGEQKEAIVDLLFKKNRKVTVKQLKEDYFKKIECFDSVEISGVEDRFNASLGTYHDLLKIIKDKDFLDNEENEDILEDIVLTLTLFEDKEMIEKRLSKYAHLFDKKVLKQLKRRRYTGWGRLSRKLINGIKDKQSGKTILDFLKSDGFANRNFMQLIHDDSLTFKEEITKAQVKGQGDSLHEQIANLAGSPAIKKGILQSVKIVDELVKVMGRHKPENIVIEMARENQTTQKGQKNSRERMKRIEEGIKELGSQILKEHPVENTQLQNEKLYLYYLQNGRDMYVDQELDINRLSDYDVDHIVPQSFLKDDSIDNKVLTRSDKARGKSDNVPSEEVVKKMKNYWRQLLNAKLITQRKFDNLTKAERGGLSELDKAGFIKRQLVETRQITKHVAQILDSRFNTEYDENNKLIREVKIITLKSKLVSDFRKDFQFYKVREINNYHHAHDAYLNAVVGTALIKKYPKLESEFVYGDYKVYNVRKMIIKSEQEIGKATAKYFFYSNIMNFFKSDITLANGEIRKRPLIETNEETGEIVWDKTKDFATVRKVLSMPQVNIVKKTEVQTGGFSKESILPKRNSDKLIARKKDWDTKKYGGFDSPTVAYSVLVVAKVEKGKSKKLKTVKELVGITIMERSSFEKDPVAFLETKGYKNIRKELIIKLPKYSLFELENGRKRLLASAGELQKGNELALPNKYVTLLYHAHHYEKLKGSEEDKEKKLSFVEQHRDYFDEIFDQIIEFSKRYILADKNLEKIKELYSNKEVKSISELAENFIHLLTFTSLGAPAAFKFFDTTIDRKRYTSTTEVLNATLIHQSITGLYETRIDLSQLGGD

SEQ ID NO: 279 - protein, 1368 aa, synthetic construct
MDKKYSIGLDIGTNSVGWAVITDEYKVPSKKFKVLGNTDRHSIKKNLIGALLFDSGETAEATRLKRTARRRYTRRKNRICYLQEIFSNEMAKVDESFFHRLEESFLVEEDKRNERHPIFGNIVDEVAYHEKYPTIYHLRKKLVDSDEKADLRLIYLALAHMIKFRGHFLIEGDLNSDNSDVQKLFVQLVQTYNQLFEESPIEAEGVDAKAILSEKLSKSRRLENLIAQLPGEKKNGLFGNLIALSLGLTPNFKSNFDLSEDAKLQLSKDTYDDDLEELLGQIGDQYADLFLAAKNLSDAILLSGILRVNTESTKAPLSASMIKRYDEHHQDLTLLKELVRKQLPEKYKEIFFDQSKNGYAGYIDGGASQEEFYKYIKKILEKMDGTEELLAKLEREDLLRKQRTFDNGSIPHQIHLGELHAILRRQEEYYPFLKENREKIEKILTFRIPYYVGPLARGNSRFAWMSRKSDETITPWNFDEVVDKGASAEKFIERMTNFDKNLPDEKVLPKHSLLYEYFTVYNELTKVKYVTEGGRKPEFLDGEQKKEIVDLLFKKNRKVTVKQLKEYYFKEFDCFDIVEISGVEDRFNASLGTYHDLLKIIKDKEFLDNEENEEILEDIVLTLTLFEDREMIKERLEKYADLFDKKVMKQLKRRRYTGWGRLSKKLINGIRDKQSGKTILDFLKEDGFTNRNFMQLIHDDNLTFKEEIDKAQVTGKGDSLHEHIANLAGSPAIKKGILQTVKVVDELVKVMGRHKPENIVIEMARENQTTQKGQKNSRERMKRIEEGIKELGSQILKEHPVENTQLQNEKLYLYYLQNGRDMYVDQELDINRLSDYDVDHIVPQSFLKDDSIDNKVLTRSDKARGKSDNVPSEEVVKKMKNYWRQLLNAKLITQRKFDNLTKAERGGLSELDKAGFIKRQLVETRQITKHVAQILDSRMNTKYDENDKLIREVKVITLKSKLVSDFRKDFQFYKVREINNYHHAHDAYLNAVVGTALIKKYPKLESEFVYGDYKVYDVRKMIAKSEQEIGKATAKYFFYSNIMNFFKTEITLANGEIRKRPLIETNGETGEIVWDKGRDFATVRKVLSMPQVNIVKKTEVQTGGFSKESILPKRNSDKLIARKKDWDPKKYGGFDSPTVAYSVLVVAKVEKGKSKKLKSVKELLGITIMERSSFEKNPIDFLEAKGYKEVKKDLIIKLPKYSLFELENGRKRMLASAGELQKGNELALPSKYVNFLYLASHYEKLKGSPEDNEQKQLFVEQHKHYLDEIIEQISEFSKRVILADANLDKVLSAYNKHRDKPIREQAENIIHLFTLTNLGAPAAFKYFDTTIDRKRYTSTKEVLDATLIHQSITGLYETRIDLSQLGGD

SEQ ID NO: 280 - protein, 1368 aa, synthetic construct
MDKPYSIGLDIGTNSVGWAVVTDEYKVPSKKFKVLGNTDRKSIKKNLLGALLFDSGETAEATRLKRTARRRYTRRKNRILYLQEIFAEEMNKVDESFFHRLEESFLVEEDKRGERHPIFGNIVEEVAYHEKYPTIYHLRKHLADSDEKADLRLVYLALAHIIKFRGHFLIEGDLDSENTDVQALFKELLEIYDRTFEESPLEEETVDAESILTEKISKSRRLENLLAEFPGEKKNGFFGNFLKLIVGLTPNFKSNFGLEEDAKLQFSKDTYDEDLEELLGQIGDEYADLFVAAKNLYDAILLSGILTVKDNSTKAPLSASMVKRYDEHHQDLTLLKQFIRKNLPEKYKEIFFDQSKNGYAGYIDGGASQEDFYKYLKKLLEKIDGSEYFLDKIEREDFLRKQRTFDNGSIPHQIHLQELKAIIRRQGEYYPFLKENQEKIEKILTFRIPYYVGPLARGNSRFAWLSRKSDETITPWNFDEVVDKEKSAEAFIERMTNFDKNLPDEKVLPKHSLLYEKFTVYNELTKVKYVTEGGKKPNFFDANLKQEIFDNVFKKYRKVTKKQLLDFLKKEFDEFRIVDISGVEDRFNASLGTYHDLLKILDGKDFLDDPENEEILEDIIKTLTLFEDREMIKKRLEKYSDLFDKEQLKKLERRRYTGWGRLSAKLINGIRDKETGKTILDYLIDDGNANRNFMQLIHDDSLSFKEEIAKAQVIGDSESLHEVIANLAGSPAIKKGILQSLKIVDELVKVMGRYEPENIVVEMARENQTTQKGQKNSRERMKRLEESIKELGSKILKEHPTENTKLQNDKLYLYYLQNGKDMYTGEPLDIDNLSDYDVDHIVPQSFLKDDSIDNRVLVSSAKARGKSDDVPSEEIVKKMKPFWKKLLEAKLITQRKYDNLTKAERGGLTELDKAGFIKRQLVETRQITKHVAQILDERFNTEVDENGKLIRDVKIVTLKSKLVSQFRKEFELYKVREINNYHHAHDAYLNAVVGKALIKKYPKLESEFVYGDYPVYDVKKLIRKSSREIGKATAKMFFYSNIMNFFKSDVKLADGDVRERPDIEVNEETGEIAWDKEKHIATVKKVLSMPQVNIVKKTEVQTGGFSKESILPKRDSDKLIARKKDWDTKKYGGFDSPTVAYSVLVVADIEKGKAKKLKTVKELVGITIMERSRFEKNPVAFLEDKGYKNIQKENIIKLPKYSLFELENGRKRLLASAGELQKGNELALPNHYVTLLYHAKHYEKLKGKPEDIEESRNYVEEHRDEFDELLDQISEFSKRYILADANLEKIKKLYEKNEDASIEELASSFINLLTFTALGAPAAFKFFGKNIDRKRYTSTKEILNATLIHQSITGLYETRIDLSKLGED

SEQ ID NO: 281 - protein, 1368 aa, synthetic construct
MDKSYSIGLDIGTNSVGWAVITDEYKVPSKKFKVLGNTDRHSIKKNLLGALLFDSGETAEATRLKRTARRRYTRRKNRIRYLQEIFAEEMSKVDDSFFHRLEESFLVEEDKRGERHPIFGNIVDEVAYHEEYPTIYHLRKYLADSTEKADLRLIYLALAHIIKFRGHFLIEGDLNPENTDVQKLFIQFVETYDNTFEESHLSEETVDAKAILTDKLSKSRRLENLIKQFPGEKKNGLFGNLIALSLGLTPNFKTNFELSEDAKLQFSKDTYDEDLENLLAQIGDDYADLFVAAKNLYDAILLSGILTVNTEITKAPLSASMIKRYDEHHQDLTLLKAFVREQLPEKYKEIFFDESKNGYAGYIDGGASQEEFYKYIKPILEKLDGTEYFLDKIEREDFLRKQRTFDNGSIPHQIHLQELHAILRRQEEFYPFLKENQEKIEKILTFRIPYYVGPLARGNSRFAWLSRKSDETITPWNFEEVVDKEASAQAFIERMTNFDKNLPEEKVLPKHSLLYEKFTVYNELTKVKYITEGMRKPAFLSANQKEEIVDELFKKNRKVTVKKLKEFLFKEIECFDIVEISGVEDRFNASLGTYHDLLKIIKDKDFLDNEENEDILEDIVLTLTLFEDREMIEQRLEKYADLFDKKVLKKLKRRRYTGWGRLSAKLINGIRDKQSGKTILDYLIDDGFANRNFMQLIHDDSLTFKEEIKKAQVIGQGDSLHETIANLAGSPAIKKGILQSLKIVDELVKVMGRHNPENIVIEMARENQTTQKGQKNSRERLKRLEESIKKLGSNILKEHPVENTQLQNDKLYLYYLQNGKDMYTGEELDIDRLSDYDVDHIIPQSFIKDDSIDNRVLTSSAKARGKSDNVPSEEVVKKMKSFWRQLLNAKLISQRKFDNLTKAERGGLSELDKAGFIKRQLVETRQITKHVAQILDSRFNTKYDENDKLIRKVKIITLKSKLVSQFRKDFGFYKVREINDYHHAHDAYLNAVVGKALIKKYPKLESEFVYGDYKVYDSRKMIAKSEQEIGKATAKYFFYSNIMNFFKSEITLANGEIRKRPLIETNEETGEIVWDKEKDFATVKKVLSMPQVNIVKKTEVQTGGFSKESILPKRDSDKLIARKKDWDTKKYGGFDSPTVAYSVLVVADIEKGKAKKLKTVKELVGITIMERSSFEKNPIAFLEDKGYKNIQKDSIIKLPKYSLFELENGRKRLLASAGELQKGNELALPQHYVTLLYHAKRYEKLKESPEDNEKHLEYVEQHRSEFDEILDQISEFSERYILADKNLEKIEELYEKNEDKDISELASSFINLLTFTALGAPAAFKFFGKTIDRKRYTSTTEILNATLIHQSITGLYETRIDLSQLGGD

SEQ ID NO: 282 - protein, 1368 aa, synthetic construct
MDKPYSIGLDIGTNSVGWAVVTDEYKVPSKKFKVLGNTDRHSIKKNLLGALLFDSGETAEATRLKRTARRRYTRRKNRILYLQEIFAEEMNKVDDSFFHRLEESFLVEEDKRFERHPIFGNIVDEVAYHEKYPTIYHLRKHLADSDEKADLRLVYLALAHIIKFRGHFLIEGDLNSENTDVQKLFEDFVQVYDKTFEESHLSEETVDASSILTAKISKSRKLENLIKQFPTEKKNGLFGNLIALSLGLQPNFKTNFDLSEDAKLQFSKDTYEEDLENLLGQIGDDYADLFVAAKNLYDAILLSGILTVDTEITKAPLSASMIKRYDEHHQDLTLLKKFIRKNLPEKYKEIFFDESKNGYAGYIDGGASQEEFYKYLKPLLSKIDGSEYFLDKIEREDFLRKQRTFDNGSIPHQIHLQELHAILRRQGEYYPFLKENQEKIEKILTFRIPYYVGPLARGNSRFAWASRKSDETITPWNFDEVVDKEKSAEAFIERMTNNDKNLPEEKVLPKHSLLYEKFTVYNELTKVKYVTEGMRKPAFFDANQKQEIFDGLFKKNRKVTVKKLLNFLFKEFEEFRIVDISGVEKKFNASLGTYHDLLKIIKDKDFLDNPENEDILEDIVLTLTLFEDREMIKKRLSKYADLFDKKQLKKLERRRYTGWGRLSAKLINGIRDKQSGKTILDYLIDDGFANRNFMQLIHDDSLSFKEEIKKAQVIGKLDSLHEVIANLAGSPAIKKGILQSLKIVDELVKVMGRYNPENIVIEMARENQTTQKGQRNSRERLKRLEESLKELGSDILKEHPVENTQLQNDKLYLYYLQNGKDMYTGEELDIDRLSDYDVDHIIPQSFIKDDSIDNRVLTSSAKARGKSDDVPSIEVVKKMKSFWSQLLSAKLISQRKFDNLTKAERGGLTELDKAGFIKRQLVETRQITKHVAQILDSRFNTKYDENDKLIRKVKIITLKSKLVSQFRKEFELYKVREINDYHHAHDAYLNAVVGKALIKKYPKLESEFVYGDYKVYNSYKMIAKSEQEIGKATAKYFFYSNIMNFFKTDITLANGEIRKRPLIETNEETGEIVWNKEKDFATVRKVLSMPQVNIVKKTEVQTGGFSKESILPKRDSDKLIARKKDWDTKKYGGFDSPTVAYSVLVVADIEKGKSKKLKTVKELVGITIMERSAFEKNPVAFLEDKGYKNIQKDNIIKLPKYSLFELENGRKRLLASAGELQKGNELALPQKYVTLLYHAHRYEKLKESPEDNPKHLEYVENHKSEFDEILDQISEFSKRYILADKNLEKIEELYAKNNDASVEELASSFINLLTFTALGAPAAFKFFGKTIDRKRYTSTTEILNATLIHQSITGLYETRIDLSQLGGD

SEQ ID NO: 283 - protein, 1368 aa, synthetic construct
MKKKYSIGLDIGTNSVGWAVITDEYKVPSKKFKVLGNTDRHSIKKNLIGALLFDSGETAEATRLKRTARRRYTRRKNRIRYLQEIFAEEMSKVDDSFFHRLEESFLVEEDKKHERHPIFGNIVDEVAYHEKYPTIYHLRKKLADSTEKADLRLIYLALAHMIKFRGHFLIEGQLNPDNSDVQELFIQLLQTYNQLFEENPLKESRVDAKAILSAKLSKSRRLENLIAQFPGEKKNGLFGNLIALSLGLTPNFKSNFDLAEDAKLQLSKDTYDEDLDNLLAQIGDQYADLFLAAKNLSDAILLSDILTVNSESTKAPLSASMVKRYDEHHQDLTLLKALVRQQLPEKYKEIFFDDSKNGYAGYIDGGASQEEFYKFIKPILEKMDGTEELLAKINREDFLRKQRTFDNGSIPHQIHLGELHAILRRQEEFYPFLKENQEKIEKILTFRIPYYVGPLARGNSRFAWMTRKSEETITPWNFEEVVDKEASAQAFIERMTNFDKNLPNEKVLPKHSLLYEYFTVYNELTKVKYVTEGMGKPEFFSGNQKEEIVDLLFKKNRKVTVKQLKEDYFKKIECFDGVEISGVEDRFNASLGTYHDLLKIIKDKDFLDNEENEDILEDIVLTLTLFEDREMIEERLEKYAHLFDKKVLKQLKRRRYTGWGRLSRKLINGIRDKQSGKTILDFLKSDGFANRNFMQLIHDDSLTFKEEIQKAQVIGQGESLHEQIADLAGSPAIKKGILQSVKIVDELVKVMGRHKPENIVIEMARENQTTQKGQKNSRERMKRIEEGIKELGSQILKEHPVENTQLQNEKLYLYYLQNGRDMYVDQELDINRLSDYDVDHIVPQSFLKDDSIDNKVLTRSDKARGKSDNVPSEEVVKKMKNYWRQLLNAKLITQRKFDNLTKAERGGLSELDKAGFIKRQLVETRQITKHVAQILDSRFNTKRDENDKLIREVKIITLKSKLVSDFRKDFQFYKVREINNYHHAHDAYLNAVVGTALIKKYPKLESEFVYGDYKVYDVRKMIAKSEQEIGKATAKYFFYSNIMNFFKSEITLANGEIRKRPLIETNEETGEIAWDKGKDFATVRKVLSMPQVNIVKKTEVQTGGFSKESILPKRNSDKLIARKKDWDTKKYGGFDSPTVAYSVLVVAKVEKGKVKKLKSVKELVGITIMERSSFEKNPIAFLEDKGYKEIKKDLIIKLPKYSLFELENGRKRMLASAGELQKGNELALPSHYVTLLYHASNYEKLKGKSEDIEKKLEYVEQHRHEFDEIFEQIIEFSKRVILADANLSKVKSLFNENRDKSIEELAENFIHLLTLTSLGAPAAFKFFDKTIDRKRYTSTTEVLNATLIHQSITGLYETRIDLSQLGGD

SEQ ID NO: 284 - protein, 1368 aa, synthetic construct
MKKPYSIGLDIGTNSVGWAVVTDDYKVPSKKMKVLGNTDRSSIKKNLLGALLFDSGETAEATRLKRTARRRYTRRKNRILYLQEIFAEEMNKVDESFFHRLEDSFLVEEDKRGERHPIFGTIVEEVKYHEEFPTIYHLRKHLADSKEKADLRLVYLALAHIIKFRGHFLIEGKLDTENTDVQELFKEFLEVYDNTFERSALSEETVQVEEILTDKISKSAKKERVLKLFPNEKSNGRFAEFLKLIVGNQADFKKHFELEEKAKLQFSKDTYEEDLEGLLGQIGDEYADLFVSAKKLYDSILLSGILTVTDNSTKAPLSASMVQRYEEHHEDLTKLKKFIRKKLSEKYKEVFFDKSKNGYAGYIDGGTKQEDFYKYLKKLLNKIEGSEYFLDKIEREDFLRKQRTFDNGSIPHQIHLQEMRAIIRRQAEYYPFLAENQDKIEKILTFRIPYYVGPLARGNSRFAWASRKSDETITPWNFDEIIDKEKSAEAFINRMTNYDLYLPDEKVLPKHSLLYEKFTVYNELTKVKYITEQMGKTEFFDANMKQEIFDGVFKKYRKVTKDKLLNFLEKEFDEFRIVDLSGVEKAFNASLGTYHDLKKILNDKDFLDDSENEKILEDIILTLTLFEDREMIRKRLSKYSDLFTKEQLKKLERRHYTGWGRLSAKLINGIRDKETRKTILDYLIDDGNSNRNFMQLIHDDALSFKEEIAKAQVIGETDSLHQVVADLAGSPAIKKGILQSLKIVDELVKVMGRHNPENIVVEMARENQTTNKGQRNSRERLKGLTDSIKELGSDILKEHPVDNSQLQNDRLYLYYLQNGKDMYTGEELDIDNLSQYDVDHIIPQSFIKDDSIDNRVLVSSAKARGKSDDVPSIEVVRKMKSFWSKLLSAKLISQRKFDNLTKAERGGLTDDDKAGFIKRQLVETRQITKHVAQILDERFNTETDENNKLIRKVKIVTLKSKLVSQFRKEFELYKVREINDYHHAHDAYLNAVVGKALIGKYPQLEPEFVYGDYPKFNSFKLVRKSAKEEGKATAKKFFYSNIMNFFKKDVKLADGTVIERPQVEVNDETGEIVWDKNKHISIVKKVLSMPQVNIVKKTEVQTGGFSKESILPKRNSDKLIARKKKWDTKKYGGFDSPIVAYSVLVIADIEKGKSKKLKTVKELVGITIMERSTFEKNPVAFLENKGYQNIQEENIIKLPKYSLFELEDGRKRLLASAGELQKGNELALPNHLVTLLYHAKNIEKIDEKEEEEPEHLNYVQKHRDEFKELLDQVSEFSKRYILADKNLEKIEELYAQNNSADIEELASSFINLLTFTAIGAPADFKFFGKNIDRKRYTSTTEILNATLIHQSITGLYETRIDLSKLGED

SEQ ID NO: 285 - protein, 1368 aa, synthetic construct
MDKKYSIGLDIGTNSVGWAVITDEYKVPSKKFKVLGNTDRTSIKKNLLGALLFDSGETAEATRLKRTARRRYTRRKNRIRYLQEIFAEEMAKVDDSFFHRLEESFLVENDKKGERHPIFGNIVDEVAYHEKYPTIYHLRKKLADSTEKADLRLIYLALAHMIKFRGHFLIEGDLNPENSDVQKLFIQLVQTYNQLFEESPIEEITVDAKAILSARLSKSRRLENLIAQFPGQKKNGLFGNLIALSLGLTPNFKSNFDLSEDAKLQLSKDTYDEDLDNLLAQIGDQYADLFLAAKNLSDAILLSDILTVNSEITKAPLSASMVKRYDEHHQDLTLLKALVRQQLPEKYKEIFFDDSKNGYAGYIDGGASQEEFYKYIKPILEKMDGTEELLAKLNREDFLRKQRTFDNGSIPHQIHLGELHAILRRQEEFYPFLKENREKIEKILTFRIPYYVGPLARGNSRFAWMTRKSEETITPWNFEEVVDKEASAQAFIERMTNFDKNLPEEKVLPKHSLLYEYFTVYNELTKVKYVTEGMRKPEFLSGEQKEEIVDLLFKTNRKVTVKQLKEDYFKKIECFDSVEISGVEDRFNASLGTYHDLLKIIKDKDFLDNEENEDILEDIVLTLTLFEDREMIEQRLEKYAHLFDKKVLKQLKRRRYTGWGRLSRKLINGIRDKQSGKTILDFLKSDGFANRNFMQLIHDDSLTFKEEIKKAQVIGQGDSLHEQIANLAGSPAIKKGILQTLKIVDELVKVMGRHAPENIVIEMARENQTTQKGQKNSRERMKRIEEGIKELGSQILKEHPVENTQLQNEKLYLYYLQNGRDMYVDQELDINRLSDYDVDHIVPQSFLKDDSIDNKVLTRSDKARGKSDNVPSEEVVKKMKNYWRQLLNAKLITQRKFDNLTKAERGGLSELDKAGFIKRQLVETRQITKHVAQILDSRFNTERDENDKLIRDVKIITLKSKLVSDFRKDFQFYKVREINNYHHAHDAYLNAVVGTALIKKYPKLESEFVYGDYKVYDVRKLIAKSEQEIGKATAKYFFYSNIMNFFKTEITLANGEIIKRPLIETNEETGEIVWNKQKDFATVRKVLSMPQVNIVKKTEVQTGGFSKESILPKRNSDKLIARKKDWDTKKYGGFDSPTVAYSVLVIAKIEKGKSKKLKTVKELVGITIMERSSFEKDPIGFLEKKGYKDIQKDLIIKLPKYSLFELENGRKRLLASAGELQKGNELALPSKYVTFLYLASNYEKLKGSPEDNEQKRPYVEQHMDEFKEILDQISEFSKRYILADKNLDKIISLYNQNNDSDIEELAENFIHLFTFTSLGAPAAFKFFDKTIDRKRYTSTTEVLNATLIHQSITGLYETRIDLSQLGGD

SEQ ID NO: 286 - protein, 1368 aa, synthetic construct
MDKKYSIGLDIGTNSVGWAVITDEYKVPSKKFKVLGNTDRHSIKKNLIGALLFDSGETAEATRLKRTARRRYTRRKNRICYLQEIFSNEMAKVDDSFFHRLEESFLVEEDKKHERHPIFGNIVDEVAYHEKYPTIYHLRKKLVDSTDKADLRLIYLALAHMIKFRGHFLIEGDLNPDNSDVQKLFKELIDAYNQTFEESPLDEESVDAEAILTEKLSKSRRLENLLALFPGEKKNGLFGNILALSVGLTPNFKSNFDLAEDAKLQFSKDTYDEDLEELLGQIGDEYADLFLAAKNVYDAILLSGILTVNTEITKAPLSASMIKRYDEHHQDLTLLKALVRQQLPEKYKEIFFDQSKNGYAGYIDGGASQEEFYKFIKPILEKMDGTEELLVKLNREDLLRKQRTFDNGSIPHQIHLGELHAILRRQEDFYPFLKDNREKIEKILTFRIPYYVGPLARGNSRFAWMTRKSEETITPWNFEEVVDKGASAQSFIERMTNFDKNLPNEKVLPKHSLLYEYFTVYNELTKVKYVTEGMRKPAFLSGEQKKAIVDLLFKTNRKVTVKQLKEDYFKKIECFDSVEISGVEDRFNASLGTYHDLLKIIKDKDFLDNEENEDILEDIVLTLTLFEDREMIEERLKTYAHLFDDKVMKQLKRRRYTGWGRLSRKLINGIRDKQSGKTILDFLKSDGFANRNFMQLIHDDSLTFKEDIQKAQVSGQGDSLHEHIANLAGSPAIKKGILQTVKVVDELVKVMGRHKPENIVIEMARENQTTQKGQKNSRERMKRLLEAIKEFKSEILKEHPVENTKLQNDKLYLYYLQNGKDMYTGEPLDIDRLSDYDVDHIVPQSFLKDDSIDNRVLVSSEEARGKSDDVPSEAVVRKMKSYWKKLLDAKLITQRKFDNLTKAERGGLSELDKAGFIKRQLVETRQITKHVAQILDSRMNTKYDENDKLIREVKVITLKSKLVSDFRKDFQFYKVREINNYHHAHDAYLNAVVGTALIKKYPKLESEFVYGDYKVYDVRKMIAKSEQEIGKATAKYFFYSNIMNFFKTEITLANGEIRKRPLIETNGETGEIVWDKGRDFATVRKVLSMPQVNIVKKTEVQTGGFSKESILPKRNSDKLIARKKDWDPKKYGGFDSPTVAYSVLVVAKVEKGKSKKLKSVKELLGITIMERSSFEKNPIDFLEAKGYKEVKKDLIIKLPKYSLFELENGRKRMLASAGELQKGNELALPSKYVNFLYLASHYEKLKGSPEDNEQKQLFVEQHKHYLDEIIEQISEFSKRVILADANLDKVLSAYNKHRDKPIREQAENIIHLFTLTNLGAPAAFKYFDTTIDRKRYTSTKEVLDATLIHQSITGLYETRIDLSQLGGD

SEQ ID NO: 287 - protein, 1368 aa, synthetic construct
MKKPYSIGLDIGTNSVGWAVVTDEYKVPSKKFKVLGNTDRQSIKKNLLGALLFDSGETAEATRLKRTARRRYTRRKNRILYLQEIFAEEMNKVDDSFFHRLEESFLVEEDKRGERHPIFGNIVEEVAYHEKYPTIYHLRKHLADSTEKADLRLVYLALAHIIKFRGHFLIEGDLNAENTDVQKLFKKFVEVYDNTFEESHLSEETVDAEAILTEKISKSRRLENLIAQFPNEKKNGLFGNLLALSLGLQPNFKTNFGLSEDAKLQFSKDTYDEDLENLLGQIGDEYADLFVAAKNLYDAILLSGILTVNDSSTKAPLSASMIKRYDEHHQDLTLLKKFIRENLPEKYKEIFFDESKNGYAGYIDGGASQEEFYKYLKKILSKVDGSEYFLEKIEREDFLRKQRTFDNGSIPHQIHLQELHAILRRQEEYYPFLKENQEKIEKILTFRIPYYVGPLARGNSRFAWASRKSDETITPWNFDEVVDKEASAEAFIERMTNNDKNLPEEKVLPKHSLLYEKFTVYNELTKVKYVTEGMGKAKFFDANLKQEIFDGLFKKYRKVTKKKLLEFLFKEFDEFRIVEISGVEKAFNASLGTYHDLLKIIKDKEFLDNPENEDILEDIVLTLTLFEDREMIKKRLQKYADLFDKKQLKKLERRRYTGWGRLSAKLINGIRDKQSGKTILDYLIDDGFANRNFMQLIHDDNLSFKEEIAKAQVIGESDSLHEVIADLAGSPAIKKGILQSLKIVDELVKVMGRYAPENIVVEMARENQTTQKGQRNSRERLKRLEEAIKELGSKILKEHPVENTQLQNDKLYLYYLQNGKDMYTGEELDIDRLSDYDVDHIIPQSFIKDDSIDNRVLTSSAKARGKSDDVPSIEVVKKMKSFWSKLLSAKLISQRKFDNLTKAERGGLTELDKAGFIKRQLVETRQITKHVAQILDERFNTEFDENDKLIRDVKIITLKSKLVSNFRKEFELYKVREINDYHHAHDAYLNAVVGKALIKKYPKLESEFVYGDYPVYNSYKMIAKSEKEIGKATAKMFFYSNIMNFFKTEIKLADGTVVERPVIEVNEETGEIVWDKTKHIATVKKVLSMPQVNIVKKTEVQTGGFSKESILPKRDSDKLIARKKDWDTKKYGGFDSPTVAYSVLVVADIEKGKSKKLKTVKELVGITIMERSRFEKNPVAFLEDKGYQNIQEEKIIKLPKYSLFELENGRKRLLASAGELQKGNELALPNKYVTLLYHAKHYEKLKEKPEDNEKHREYVEKHRDEFDEILDQISEFSKRYILADKNLEKIKELYSKNESASIEELASSFINLLTFTALGAPAAFKFFGKTIDRKRYTSTKEILNATLIHQSITGLYETRIDLSKLGGD

SEQ ID NO: 288 - protein, 1368 aa, synthetic construct
MDKKYSIGLDIGTNSVGWAVITDEYKVPSKKFKVLGNTDRKSIKKNLIGALLFDSGETAEATRLKRTARRRYTRRKNRIRYLQEIFAEEMAKVDDSFFHRLEESFLVEEDKENERHPIFGNIVDEVAYHEKYPTIYHLRKKLADSDEKADLRLVYLALAHMIKFRGHFLIEGDLNSDNSDVQKLFEQLVQTYNQLFEESPINEEEVDAKAILTAKLSKSRRLENLIALFPGEKKNGLFGNLIALSLGLTPNFKSNFDLAEDAKLQLSKDTYDEDLENLLAQIGDQYADLFLAAKNLSDAILLSGILTVKDESTKAPLSASMVKRYDEHHQDLTLLKKLVRQQLPEKYKEIFFDQSKNGYAGYIDGGASQEEFYKYLKKILEKMDGSEEFLDKINREDFLRKQRTFDNGSIPHQIHLQELHAILRRQEKYYPFLKDNREKIEKILTFRIPYYVGPLARGNSRFAWMSRKSDETITPWNFEEVVDKEASAQKFIERMTNFDKNLPNEKVLPKHSLLYEYFTVYNELTKVKYVTEGMRKPEFFSGEQKQEIVDLLFKKNRKVTVKQLKEYLFKNIECFDSVEISGVEDRFNASLGTYHDLLKIIKDKDFLDNEENEDILEDIVLTLTLFEDREMIEERLKKYANLFDDKVIKQLKRRRYTGWGRLSKKLINGIRDKQSGKTILDYLKSDGFANRNFMQLIHDDSLTFKEEIEKAQVSGQGDSLHELIANLAGSPAIKKGILQTIKIVDELVKVMGRHAPENIVIEMARENQTTQKGQKNSRERMKRLEEAIKELGSQILKEHPVENTQLQNEKLYLYYLQNGKDMYTGEELDIDRLSDYDVDHIVPQSFLKDDSIDNKVLVSSKKARGKSDNVPSEEVVKKMKNYWKKLLDAKLITQRKFDNLTKAERGGLTELDKAGFIKRQLVETRQITKHVAQILDSRFNTKYDENDKLIRDVKIITLKSKLVSQFRKDFQFYKVREINNYHHAHDAYLNAVVGTALIKKYPKLESEFVYGDYKVYDVRKMIAKSEREIGKATAKMFFYSNIMNFFKSEVTLANGEIRKRPLIEVNEETGEIVWDKEKDFATVRKVLSMPQVNIVKKTEVQTGGFSKESILPKRNSDKLIARKKDWDPKKYGGFDSPTVAYSVLVVAKVEKGKTKKLKTVKELVGITIMERSSFEKNPIAFLEAKGYKEVQEDLIIKLPKYSLFELENGRKRMLASAGELQKGNELALPSKYVTLLYLASHYEKLKGSPEDNEEKQNYVEQHKEYFDEIIEQISEFSKRYILADANLEKIKSLYNKKRDKSIEEQAESFINLLTFTNLGAPAAFKFFDTTIDRKRYTSTKEVLNATLIHQSITGLYETRIDLSKLGGD

SEQ ID NO: 289 - protein, 1368 aa, synthetic construct
MDKKYSIGLDIGTNSVGWAVITDEYKVPSKKFKVLGNTDRHSIKKNLIGALLFDSGETAEATRLKRTARRRYTRRKNRIRYLQEIFSEEMSKVDDSFFHRLEESFLVEEDKKHERHPIFGNIVDEVAYHEKYPTIYHLRKKLADSTDKADLRLIYLALAHMIKFRGHFLIEGDLNPDNSDVDKLFIQLVQTYNQLFEENPINEEGVDAKAILSAKLSKSRRLENLIAQLPGEKKNGLFGNLIALSLGLTPNFKSNFDLAEDAKLQLSKDTYDEDLDNLLAQIGDQYADLFLAAKNLSDAILLSDILTVNSEITKAPLSASMIKRYDEHHQDLTLLKALVRQQLPEKYKEIFFDPSKNGYAGYIDGGASQEEFYKFIKPILEKMDGAEELLAKLEREDFLRKQRTFDNGSIPHQIHLGELHAILRRQEDFYPFLKENREKIEKILTFRIPYYVGPLARGNSRFAWMTRKSEETITPWNFEEVVDKGASAQSFIERMTNFDKNLPNEKVLPKHSLLYEYFTVYNELTKVKYVTEGMRKPEFLSGEQKEAIVDLLFKKNRKVTVKQLKEDYFKKIECFDSVEISGVEDRFNASLGTYHDLLKIIKDKDFLDNEENEDILEDIVLTLTLFEDREMIEERLKKYAHLFDDKVLKQLKRRRYTGWGRLSRKLINGIRDKQSGKTILDFLKSDGFANRNFMQLIHDDSLTFKEEIQKAQVSGQGDSLHETIANLAGSPAIKKGILQTIKIVDELVKVMGRHKPENIVIEMARENQTTQKGQKNSRERMKRIEEGIKELGSQILKEHPVENTQLQNEKLYLYYLQNGRDMYVDQELDINRLSDYDVDHIVPQSFLKDDSIDNKVLTRSDKARGKSDNVPSEEVVKKMKNYWRQLLNAKLITQRKFDNLTKAERGGLSELDKAGFIKRQLVETRQITKHVAQILDSRMNTEYDENDKLIREVKIITLKSKLVSDFRKDFQFYKVREINDYHHAHDAYLNAVVGTALIKKYPKLESEFVYGDYKVYDVRKMIAKSEQEIGKATAKYFFYSNIMNFFKTEITLANGEIRKRPLIETNEETGEIVWDKGKDFATVRKVLSMPQVNIVKKTEVQTGGFSKESILPKRNSDKLIARKKDWDTKKYGGFDSPTVAYSVLVVAKVEKGKSKKLKSVKELVGITIMERSSFEKDPISFLEDKGYKNVQKDLIIKLPKYSLFELENGRKRMLASAGELQKGNELALPQKYVNFLYLASHYEKLKGKPEDNEQKLLYVEQHKHYFDEIFDQISEFSERYILADANLEKILELYNKHRDKPISELAENFIHLFTFTSLGAPAAFKFFDTTIDRKRYTSTTEVLDATLIHQSITGLYETRIDLSQLGGD

SEQ ID NO: 290 - protein, 1368 aa, synthetic construct
MDKKYSIGLDIGTNSVGWAVITDEYKVPSKKFKVLGNTDRQSIKKNLIGALLFDSGETAEATRLKRTARRRYTRRKNRICYLQEIFSEEMSKVDDSFFHRLEESFLVEEDKKHERHPIFGNIVDEVAYHEKYPTIYHLRKKLVDSTDKADLRLIYLALAHMIKFRGHFLIEGDLNPDNSDVDKLFIQLVQTYNQLFEENPINAEGVDAKAILSARLSKSRRLENLIAQLPGEKKNGLFGNLIALSLGLTPNFKSNFDLSEDAKLQLSKDTYDEDLDNLLAQIGDQYADLFLAAKNLSDAILLSDILRVNTEITKAPLSASMIKRYDEHHQDLTLLKALVRQQLPEKYKEIFFDKSKNGYAGYIDGGASQEEFYKFIKPILEKMDGTEELLVKLNREDLLRKQRTFDNGSIPHQIHLGELHAILRRQEDFYPFLKDNREKIEKILTFRIPYYVGPLARGNSRFAWMTRKSDETITPWNFEEVVDKGASAQSFIERMTNFDKNLPNEKVLPKHSLLYEYFTVYNELTKVKYVTEGMRKPAFLSGEQKKEIVDLLFKTNRKVTVKQLKEDLFKEIECFDSVEISGVEDRFNASLGTYHDLLKIIKDKDFLDNEENEDILEDIVLTLTLFEDREMIEERLKTYANLFDKKVMKQLKRRRYTGWGRLSRKLINGIRDKQSGKTILDFLKSDGFANRNFMQLIHDDSLTFKEDIQKAQVSGQGDSLHEQIANLAGSPAIKKGILQTVKVVDELVKVMGRHKPENIVIEMARENQTTQKGQKNSRERMKRIEEGIKELGSQILKEHPVENTQLQNEKLYLYYLQNGRDMYTDQELDINRLSDYDVDHIVPQSFLKDDSIDNKVLTSSKKARGKSDDVPSEEVVKKMKSYWRQLLNAKLITQRKFDNLTKAERGGLSELDKAGFIKRQLVETRQITKHVAQILDSRMNTKYDENDKLIRDVKVITLKSKLVSDFRKDFQFYKVREINNYHHAHDAYLNAVVGTALIKKYPKLESEFVYGDYKVYDSRKMIAKSEQEIGKATAKYFFYSNIMNFFKSEIKLANGEIRKRPLIETNEETGEIVWDKGRDFATVRKVLSMPQVNIVKKTEVQTGGFSKESILPKRNSDKLIARKKDWDPKKYGGFDSPTVAYSVLVVAKVEKGKAKKLKSVKELLGITIMERSSFEKNPVDFLEAKGYKNIQKDLIIKLPKYSLFELENGRKRLLASAGELQKGNELALPQKYVTFLYLASHYEKLKGKPEDEEKKQLFVEQHRHYFDEILEQISEFSERYILADKNLEKILELYSEHEDYSIREQAENIINLFTFTNLGAPAAFKYFDTTIDRKRYTSTTEILNATLIHQSITGLYETRIDLSQLGGD

SEQ ID NO: 291 - protein, 1368 aa, synthetic construct
MKKPYSIGLDIGTNSVGWAVVTDEYKVPSKKFKVLGNTDRQSIKKNLLGALLFDSGETAEATRLKRTARRRYTRRKNRILYLQEIFAEEMNKVDESFFHRLEESFLVEEDKRGERHPIFGNIVDEVAYHEKYPTIYHLRKHLADSTEKADLRLVYLALAHIIKFRGHFLIEGDLNTENTDVQKLFKQFLEVYDKTFEESHLSEETVDAEAILTEKVSKSRRLENLIAQFPNEKKNGFFGNLIALSLGLQPNFKTNFELSEDAKLQFSKDTYDEDLENLLGQIGDEYADLFVAAKNLYDAILLSGILTVNDESTKAPLSASMIKRYDEHHQDLTLLKAFIRKNLPEKYKEIFFDKSKNGYAGYIDGGASQEEFYKYIKKLLSKIDGSEYFLEKIEREDFLRKQRTFDNGSIPHQIHLQELKAILRRQGEYYPFLKENQEKIEKILTFRIPYYVGPLARGNSRFAWASRKSDETITPWNFDEVVDKEASAEAFIERMTNNDKNLPNEKVLPKHSLLYEKFTVYNELTKVKYVTEQMGKAEFFDANMKQEIFDGLFKKERKVTKKKLLDFLKKEFDEFRIVDISGVEKAFNASLGTYHDLLKIIKDKDFLDNEENEDILEDIILTLTLFEDREMIEKRLSKYADLFDKKVLKKLERRRYTGWGRLSAKLINGIRDKQTGKTILDYLIDDGFANRNFMQLIHDDSLSFKEEIAKAQVIGEGDSLHEVIADLAGSPAIKKGILQSLKIVDELVKVMGRYNPENIVVEMARENQTTQKGQRNSRERLKRLEEAIKELGSKILKEHPVENTQLQNDKLYLYYLQNGKDMYTGEELDIDRLSDYDVDHIIPQSFIKDDSIDNRVLTSSAKARGKSDDVPSEEVVKKMKSFWNKLLNAKLISQRKFDNLTKAERGGLTELDKAGFIKRQLVETRQITKHVAQILDERFNTEFDENNKLIRDVKIVTLKSKLVSNFRKEFELYKVREINDYHHAHDAYLNAVVGTALIKKYPKLESEFVYGDYPVYNSYKMVAKSEQEIGKATAKMFFYSNIMNFFKTDIKLADGTIIERPVIEVNEETGEIVWDKDKHIATVKKVLSMPQVNIVKKTEVQTGGFSKESILPKRDSDKLIARKKDWDTKKYGGFDSPTVAYSVLVVADIEKGKSKKLKTVKELVGITIMERSRFEKNPVAFLEDKGYQNIQKDKIIKLPKYSLFELENGRKRLLASAGELQKGNELALPNKYVTLLYHAKHYEKLKEKPEDNEKHKEYVEQHRDEFKEILDQISEFSKRYILADKNLEKIEELYSKNRNASIEELASSFINLLTFTALGAPAAFKFFGTTIDRKRYTSTTEILNATLIHQSITGLYETRIDLSKLGGD

SEQ ID NO: 292 - protein, 1368 aa, synthetic construct
MKKPYSIGLDIGTNSVGWAVITDEYKVPSKKFKVLGNTDRSSIKKNLLGALLFDSGETAEATRLKRTARRRYTRRKNRILYLQEIFAEEMNKVDDSFFHRLEESFLVEEDKRGERHPIFGNIVEEVAYHEKYPTIYHLRKHLADSTEKADLRLVYLALAHIIKFRGHFLIEGDLNSENTDVQALFKQFLETYDSTFEESHLSEETVDAEAILTDKVSKSRKLENLIAQFPNEKKNGFFGNLIALSLGLQPNFKTNFGLSEDAKLQFSKDTYDEDLENLLGQIGDEYADLFVAAKNLYDAILLSGILTVNDESTKAPLSASMIKRYDEHHQDLTLLKAFVRKQLPEKYKEIFFDKSKNGYAGYIDGGASQEEFYKYIKPLLSKVDGSEYFLEKIEREDFLRKQRTFDNGSIPHQIHLQELKAILRRQGEFYPFLKENQEKIEKILTFRIPYYVGPLARGNSRFAWASRKSDETITPWNFDEVVDKEASAEAFIERMTNNDKNLPEEKVLPKHSLLYEKFTVYNELTKVKYVTEQMGKAEFFDANLKQEIFDGLFKKERKVTKKKLLEFLFKEFDEFRIVDISGVEKAFNASLGTYHDLLKIIKDKEFLDNEENEDILEDIVLTLTLFEDREMIKQRLSKYADLFDKKQLKKLERRRYTGWGRLSAKLINGIRDKQSGKTILDYLIDDGFANRNFMQLIHDDSLSFKEEIAKAQVIGDSDSLHEVIADLAGSPAIKKGILQSLKIVDELVKVMGRYNPENIVVEMARENQTTQKGQRNSRERLKRLEEAIKELGSDILKEHPVENTQLQNDKLYLYYLQNGKDMYTGEELDIDRLSDYDVDHIIPQSFIKDDSIDNRVLTSSAKARGKSDDVPSEEVVKKMKSFWKKLLNAKLISQRKFDNLTKAERGGLTELDKAGFIKRQLVETRQITKHVAQILDERFNTEFDENNKLIRKVKIITLKSKLVSNFRKEFELYKVREINDYHHAHDAYLNAVVGKALIKKYPKLESEFVYGDYPVYNSYKLIAKSEKEIGKATAKMFFYSNIMNFFKTEIKLADGTVIERPQIEVNEETGEIVWDKTKHIATVRKVLSMPQVNIVKKTEVQTGGFSKESILPKRNSDKLIARKKDWDTKKYGGFDSPTVAYSVLVVADIEKGKKKKLKTVKELVGITIMERSRFEKNPVAFLEDKGYQNIQEENIIKLPKYSLFELENGRKRLLASAGELQKGNELALPNKYVTLLYHAKHYEKLKGKPEDEEKHREYVEKHRSEFDEILDQISEFSKRYILADKNLEKIEELYDKNEDKSIEELASSFINLFTFTALGAPAAFKFFGTNIDRKRYTSTKEILNATLIHQSITGLYETRIDLSKLGGD

SEQ ID NO: 293 - protein, 1368 aa, synthetic construct
MKKKYSIGLDIGTNSVGWAVITDEYKVPSKKFKVLGNTDRHSIKKNLIGALLFDSGETAEATRLKRTARRRYTRRKNRIRYLQEIFAEEMNKVDDSFFHRLEESFLVEEDKKHERHPIFGNIVDEVAYHEKYPTIYHLRKHLVDSTEKADLRLIYLALAHMIKFRGHFLIEGDLNPENSDVQKLFIQLVQTYNNLFEEDPLNEEGVDAEAILTAKLSKSRRLENLIAQFPGEKRNGLFGNLIALSLGLTPNFKSNFELSEDAKLQLSKDTYDEDLEELLAQIGDQYADLFLAAKNLSDAILLSGILRVNDEITKAPLSASMIKRYDEHHQDLTLLKALVRAQLPEKYKEIFFDKTKNGYAGYIDGGASQEEFYKYIKPILEKMDGTEYLLAKLEREDLLRKQRTFDNGSIPHQIHLGELHAILRRQEEFYPFLKENQEKIEKILTFRIPYYVGPLARGNSRFAWMKRKSDETITPWNFEEVVDKGASAQAFIERMTNFDKNLPEEKVLPKHSLLYETFTVYNELTKVKYVTEGMGKPEFLSAEQKKEIVDGLFKKNRKVTVKQLKEFYFKEFDECRIVDISGVEDRFNASLGTYHDLLKIIKDKDFLDNVENEKILEDIVLTLTLFEDREMIEKRLAKYANLFDKKVMKQLKRRRYTGWGRLSRKLINGIRDKQSGKTILDFLKSDGFANRNFMQLIHDDSLTFKEEIDKAQVEGDGDSLHETIADLAGSPAIKKGILQTVKVVDELVKVMGRHKPENIVIEMARENQTTQKGQKNSRERLKRIEEGIKELGSDILKEHPVENTQLQNDKLYLYYLQNGRDMYTGEELDIDRLSDYDVDHIVPQSFIKDDSIDNKVLTRSAEARGKSDDVPSIEVVRKMKSYWRQLLKAGLITQRKFDNLTKAERGGLTELDKAGFIKRQLVETRQITKHVAQILDSRMNTEHDENNKLIRDVKVITLKSKLVSDFRKDFQFYKVREINDYHHAHDAYLNAVVGTALIKKYPKLESEFVYGDYKVYDSRKMIAKSEQEIGKATAKYFFYSNIMNFFKTEITLANGEIRKRPLIETNGETGEIVWDKGRDFATVRKVLSMPQVNIVKKTEVQTGGFSKESILPKRNSDKLIARKKDWDPKKYGGFDSPTVAYSVLVVAKVEKGKSKKLKSVKELLGITIMERSSFEKNPIDFLEAKGYKEVKKDLIIKLPKYSLFELENGRKRMLASAGELQKGNELALPSKYVNFLYLASHYEKLKGSPEDNEQKQLFVEQHKHYLDEIIEQISEFSKRVILADANLDKVLSAYNKHRDKPIREQAENIIHLFTLTNLGAPAAFKYFDTTIDRKRYTSTKEVLDATLIHQSITGLYETRIDLSQLGGD

SEQ ID NO: 294 - protein, 1368 aa, synthetic construct
MKKPYSIGLDIGTNSVGWAVVTDDYKVPSKKMKVLGNTDRQSIKKNLLGALLFDSGETAEATRLKRTARRRYTRRKNRILYLQEIFAEEMNKVDDSFFHRLEDSFLVEEDKRGERHPIFGNIVEEVAYHEKFPTIYHLRKHLADSTEKADLRLVYLALAHIIKFRGHFLIEGDLDTENTDVQKLFKQFVEVYDQTFEESHLSEETVDAESILTDKLSKSRRLENLLKLFPNEKKNGLFGNLIALSLGLQPNFKTNFELSEDAKLQFSKDTYDEDLENLLGQIGDEYADVFVAAKNLYDAILLSGILTVNDESTKAPLSASMIKRYEEHHEDLTLLKKFIRKNLPEKYKEIFFDESKNGYAGYIDGGTSQEEFYKYIKKLLEKIDGSEYFLDKIEREDFLRKQRTFDNGSIPHQIHLQELKAILRRQGEYYPFLKENQEKIEKILTFRIPYYVGPLARGNSRFAWASRKSDETITPWNFDEVVDKEASAEAFIERMTNNDLYLPEEKVLPKHSLLYEKFTVYNELTKVKYVTEGMGKAKFFDANMKQEIFDGLFKKNRKVTKKKLLEFLDKEFDEFRIVDISGVEKAFNASLGTYHDLLKIIKDKEFLDNEENEDILEDIVLTLTLFEDREMIKKRLEKYADLFDKKQLKKLERRHYTGWGRLSAKLINGIRDKQSGKTILDYLIDDGFSNRNFMQLIHDDNLSFKEEIAKAQVIGDTDSLHEVVAELAGSPAIKKGILQSLKIVDELVKVMGRHAPENIVVEMARENQTTAKGQRNSRERLKRLEEAIKELGSQILKEHPVENQQLQNDRLYLYYLQNGKDMYTGEELDIDRLSQYDVDHIIPQSFIKDDSIDNRVLTSSDKARGKSDDVPSEEVVKKMKSFWLKLLKAKLISQRKFDNLTKAERGGLTEDDKAGFIKRQLVETRQITKHVAQILDERFNTEFDENNKLIRDVKIITLKSKLVSNFRKEFELYKVREINDYHHAHDAYLNAVVGKALIKKYPKLEPEFVYGDYPKYNSYKLVAKSDKERGKATAKMFFYSNIMNFFKTDIKLADGTIVERPVIEVNEETGEIAWDKNKHIATVKKVLSMPQVNIVKKTEVQTGGFSKESILPKRDSDKLIARKKKWDTKKYGGFDSPTVAYSVLVVADIEKGKAKKLKTVKELVGITIMERSRFEKNPIAFLEDKGYQNIQEENIIKLPKYSLFELENGRKRLLASAGELQKGNELALPNKLVTLLYHAKHIEKLDEKDEDVPKHLEYVEEHRDEFKEILDQISEFSKRYILADKNLEKIEELYAKNEDASIEELASSFINLLTFTALGAPAAFKFFGKNIDRKRYTSTTEILNATLIHQSITGLYETRIDLSKLGGD

SEQ ID NO: 295 - protein, 1368 aa, synthetic construct
MKKPYSIGLDIGTNSVGWAVITDDYKVPSKKMKVLGNTDRKSIKKNLLGALLFDSGETAEATRLKRTARRRYTRRKNRILYLQEIFAEEMNKVDDSFFHRLEESFLVEEDKRGERHPIFGNIVEEVAYHEKFPTIYHLRKHLADSTEKADLRLVYLALAHMIKFRGHFLIEGDLNTENSDVQKLFKQFVQEYNSTFEESHLEEETVDAEEILTEKLSKSRRLENLIAQFPNEKKNGLFGNLIALMLGLQPNFKTNFDLSEDAKLQFSKDTYDEDLENLLGQIGDEYADVFVAAKNLYDAILLSGILTVNDSSTKAPLSASMIKRYDEHHEDLTLLKAFIRKNLPEKYKEIFFDKSKNGYAGYIDGGTSQEEFYKYIKKILEKMDGSEYFLDKIEREDFLRKQRTFDNGSIPHQIHLQELHAILRRQGKYYPFLKENQEKIEKILTFRIPYYVGPLARGNSRFAWASRKSDETITPWNFDEVIDKEKSAEAFIERMTNNDLYLPEEKVLPKHSLLYEKFTVYNELTKVKYVTEGMGEAEFFDANQKQEIFDHVFKKNRKVTVKKLKNFLFKEFDEFRIVDISGVEDAFNASLGTYHDLLKIIGDKEFLDNEENEDILEDIVLTLTLFEDREMIEKRLSKYADLFSKKVLKKLKRRHYTGWGRLSAKLINGIRDKQSGKTILDYLIDDGFANRNFMQLIHDDSLTFKEEIAKAQVIGNSDSLHETVADLAGSPAIKKGILQSLKIVDELVKVMGRYNPENIVVEMARENQTTAKGQRNSRERLKRLEEAMKELGSDILKEYPVENQQLQNDRLYLYYLQNGKDMYTGEELDIDRLSDYDVDHIIPQSFIKDDSIDNRVLVSSAKARGKSDDVPSEEVVKKMKPFWSKLLKAKLISQRKFDNLTKAERGGLTEDDKAGFIKRQLVETRQITKHVAQILDSRFNTERDENDKLIRKVKIITLKSKLVSNFRKDFQFYKVREINDYHHAHDAYLNAVVGTALIKKYPKLEPEFVYGDYPKYNSYKLIKKSEKERGKATAKMFFYSNIMNFFKTKVKLADGTVVERPIIEVNDETGEIVWDKEKDFATVRKVLSMPQVNIVKKTEVQTGGFSKESILPKRDSDKLIARKKKWDPKKYGGFDSPTVAYSVLVVADIEKGKTKKLKTVKELVGITIMERSSFEKNPIAFLEAKGYQNIQENNIIKLPKYSLFELENGRKRLLASAGELQKGNELALPVKYVTLLYHAKHIEKLDGKPEDKEKHLEYVMEHNEEFDEIWDQISEFSKRYILADKNLEKIEELYTKNNDKPIRELASSFINLLTFTALGAPADFKFFGETIDRKRYTSTKEILNATLIHQSITGLYETRIDLSKLGGD

SEQ ID NO: 296 - protein, 1368 aa, synthetic construct
MDKPYSIGLDIGTNSVGWAVITDEYKVPSKKFKVLGNTDRHSIKKNLLGALLFDSGETAEATRLKRTARRRYTRRKNRILYLQEIFAEEMAKVDDSFFHRLEESFLVEDDKRGERHPIFGNIVEEVAYHEKYPTIYHLRKHLADSTEKADLRLVYLALAHIIKFRGHFLIEGDLNTENSDVQKLFEQLLQTYDQTFEESHLSEITVDAKAILTAKISKSRRLENLIAQIPNEKKNGLFGNLVALSLGLQPNFKSNFDLSEDAKLQFSKDTYDEDLENLLGQIGDDYADLFVAAKNLYDAILLSGILTVNTEITKAPLSASMIKRYDEHHQDLTLLKDFVRENLPEKYKEIFFDKTKNGYAGYIDGGASQEDFYKYIKPILEKLDGSEYFLDKIEREDFLRKQRTFDNGSIPHQIHLQELHAILRRQEEFYPFLKENQEKIEKILTFRIPYYVGPLARGNSRFAWMTRKSDETITPWNFEEVVDKEASAEAFIERMTNFDKNLPDEKVLPKHSLLYEKFTVYNELTKVKYITEQMRKPAFFDSEQKKEIVDLTFKKNRKVTKKKLKEFLDKEFEEFRIVEISGVEDAFNASLGTYHDLLKIIKDKEFLDNEENEDILEDIVLTLTLFEDREMIEKRLSKYADLFDKKVLKKLERRRYTGWGRLSAKLINGIRDKQSGKTILDYLIDDGFANRNFMQLIHDDSLSFKEEIQKAQVIGKGDSLHEVIAELAGSPAIKKGILQSLKIVDELVKVMGRYNPENIVIEMARENQTTQKGQRNSRERLKRLEESLKKLGSKILKEHPVENTQLQNDKLYLYYLQNGKDMYTGEELDIDRLSDYDVDHIIPQSFIKDDSIDNRVLTSSAKARGKSDDVPSEEVVKKMKSFWQQLLKAKLISQRKFDNLTKAERGGLTELDKAGFIKRQLVETRQITKHVAQILDERFNTKYDENDKLIRKVKIITLKSKLVSQFRKDFGFYKVREINDYHHAHDAYLNAVVGKALIKKYPKLESEFVYGDYKVYNSRKMIAKSEQEIGKATAKYFFYSNIMNFFKTEITLANGEIRKRPLIETNEETGEIVWDKEKDFATVRKVLSMPQVNIVKKTEVQTGGFSKESILPKRNSDKLIARKKDWDTKKYGGFDSPTVAYSVLVIADIEKGKNKKLKTVKELVGITIMERSSFEKDPVAFLEGKGYKNIQKDTIIKLPKYSLFELENGRKRLLASAGELQKGNELALPNKYVTLLYHASRYEKLKESPEDNEKHLEYVEQHRSEFDEILDQISEFSKRYKLADKNLEKIQELYKDHDLFSVEELASSFINLLTFTALGAPAAFKFFGVTIDRKRYTSTTEILDATLIHQSITGLYETRIDLSQLGGD

SEQ ID NO: 297 - protein, 1368 aa, synthetic construct
MDKKYSIGLDIGTNSVGWAVITDEYKVPSKKFKVLGNTDRHSIKKNLIGALLFDSGETAEATRLKRTARRRYTRRKNRICYLQEIFSNEMAKVDDSFFHRLEESFLVEEDKRGERHPIFGNIVDEVAYHEKYPTIYHLRKHLADSTEKADLRLVYLALAHIIKFRGHFLIEGDLNSENSDVQKLFKQFVQTYDQTFEESHLSEETVDAESILTEKVSKSRRLENLIAQFPNEKKNGLFGNLIALSLGLQPNFKTNFELSEDAKLQFSKDTYDEDLENLLGQIGDEYADLFLAAKNLYDAILLSGILTVNDESTKAPLSASMIKRYDEHHQDLTLLKAFVRKQLPEKYKEIFFDESKNGYAGYIDGGASQEEFYKYIKKILEKIDGSEYFLDKIEREDFLRKQRTFDNGSIPHQIHLQELHAILRRQEEYYPFLKENQEKIEKILTFRIPYYVGPLARGNSRFAWASRKSDETITPWNFEEVVDKEASAEAFIERMTNFDKNLPEEKVLPKHSLLYEKFTVYNELTKVKYVTEGMGKAEFFDANMKQEIFDGLFKKNRKVTKKKLLDFLFKEFDEFRIVDISGVEDAFNASLGTYHDLLKIIKDKDFLDNEENEDILEDIVLTLTLFEDREMIRKRLSKYADLFDKKQLKKLERRRYTGWGRLSAKLINGIRDKQSGKTILDYLIDDGFANRNFMQLIHDDSLSFKEEIQKAQVIGESDSLHEHIANLAGSPAIKKGILQTVKVVDELVKVMGRHKPENIVIEMARENQTTQKGQRNSRERLKRLEEAIKELGSQILKEHPVENTQLQNDKLYLYYLQNGKDMYTGEELDIDRLSDYDVDHIIPQSFIKDDSIDNRVLTSSAKARGKSDDVPSEEVVKKMKSFWSKLLKAKLISQRKFDNLTKAERGGLSELDKAGFIKRQLVETRQITKHVAQILDSRMNTKYDENDKLIREVKVITLKSKLVSDFRKDFQFYKVREINNYHHAHDAYLNAVVGTALIKKYPKLESEFVYGDYKVYDVRKMIAKSEQEIGKATAKYFFYSNIMNFFKTEITLANGEIRKRPLIETNGETGEIVWDKGRDFATVRKVLSMPQVNIVKKTEVQTGGFSKESILPKRDSDKLIARKKDWDTKKYGGFDSPTVAYSVLVVADIEKGKAKKLKTVKELVGITIMERSAFEKNPVAFLEDKGYQNIQEDNIIKLPKYSLFELENGRKRLLASAGELQKGNELALPAKYVTLLYHAKHYEKLKEKPEDEEKHLEYVEKHRDEFKEILDQISEFSKRYILADKNLEKIEELYSKNENLSIEELASSFINLLTFTALGAPAAFKFFGTTIDRKRYTSTKEILNATLIHQSITGLYETRIDLSKLGGD

SEQ ID NO: 298 - protein, 1368 aa, synthetic construct
MKKPYSIGLDIGTNSVGWAVVTDEYKVPSKKFKVLGNTDRKSIKKNLLGALLFDSGETAEATRLKRTARRRYTRRKNRIRYLQEIFAEEMNKVDESFFHRLEESFLVEEDKRGERHPIFGNIVEEVAYHEKYPTIYHLRKHLADSPEKADLRLVYLALAHMIKFRGHFLIEGKLDTENTDVQKLFEHFLEVYDKTFEESRLSEITVNVSEILTEKISKSRKLENLIKQFPTEKSNSFFGNLLALILGLQPNFKTNFSLSEDAKLQFSKDTYDEDLEELLGQIGDDYADLFLAAKNLYDAILLSGILTVNDVSTKAPLSASMVKRYDEHHQDLTKLKMFIREKAPAKYKEIFFDQSKNGYAGYIDGGAKQEDFYKYLKGILSKIEGSEYFLEKIEREDFLRKQRTFDNGSIPHQIHLQELKAILRRQGVYYPFLKENQEKIEKILTFRIPYYVGPLARGNSRFAWASRKSDETITPWNFDEVIDKEKSAEDFIERMTNNDKNLPEEKVLPKHSLLYEKFTVYNELTKVKYVTEGMGKEEFFDANMKQEIFDGVFKKERKVTKDKLLNFLDKEFEEFRIVDISGVEKNFNASLGTYHDLLKILNDKAFLDDKENENILEDIVLTLTLFEDREMIRQRLQKYSDVFDKKQLKKLERRRYTGWGRLSAKLINGIRDKQSNKTILDYLIDDGAANRNFMQLIHDDNLSFKEEIEKAQVIGESDSLHQIIADLAGSPAIKKGILQSIKIVDELVKVMGRYNPENIVIEMARENQTTQKGQRNSRERLKRLTESIKNLGSKILKEHPVDNTQLQNDKLYLYYLQNGRDMYTGEELDIDNLSDYDVDHIIPQSFIKDDSIDNRVLVSSAKARGKSDDVPSIDVVRKMKSFWSKLLKAKLISQRKFDNLTKAERGGLTELDKAGFIKRQLVETRQITKHVAQILDERFNTEFDENNKLIRDVKIITLKSKLVSQFRKEFELYKVREINDYHHAHDAYLNAVVGKALIKKYPKLESEFVYGDYPVYNSYKLFKESNKEIGKATAKKFFYSNIMNFFKSDDKLADGTIIERPQIEVNDETGEIAWKKVKHISTVKKVLSMPQVNIVKKTEVQTGGFSKESILPKRNSDKLIARKKDWDPKKYGGFDSPTVAYSVLVVADIEKGKAKKLKTVKELLGITIMERSAFEKNPVAFLEDKGYQNIQEDKIIKLPKYSLFELENGRKRLLASAGELQKGNELALPAKYVTLLYHAKHYEKFKEKPEDIPKHLEYVNKHKLEFKELLNQILEFSKRYVLADKNLEKIEELYKNNKQASIKELATSFINLLTFTALGAPAAFKFFGNNIDRKRYTSTTEILNATLIHQSITGLYETRIDLSKLGED

SEQ ID NO: 299 - protein, 1368 aa, synthetic construct
MKKPYSIGLDIGTNSVGWAVLTDEYKVPSKKFKVLGNTDRQSIKKNLLGALLFDSGETAEATRLKRTARRRYTRRKNRILYLQEIFAEEMNKVDDSFFHRLEESFLVEEDKRGERHPIFGNIVEEVAYHEEYPTIYHLRKHLADSTEKADLRLVYLALAHIIKFRGHFLIEGDLSAENTDVQKLFKKFLEVYDNTFEESHLSEETVDVSVILTDKISKSRKLENLLAQYPNEKSNGFFGNLLKLSLGLQPNFKTNFELSEDAKLQFSKDTYEEDLENLLGQIGDDYADLFVAAKNLYDAILLSGILTVTDVSTKAPLSASMIKRYDEHHQDLTKLKDFIRKNLPEKYKEIFFDDSKNGYAGYIDGGASQEEFYKYLKGLLSKLDGSEYFLDKIEREDFLRKQRTFDNGSIPHQIHLQELKAILRRQGEYYPFLKENQEKIEKILTFRIPYYVGPLARGNSRFAWASRKSDETITPWNFDEVIDKEASAEAFITRMTNYDKNLPEEKVLPKHSLLYEKFTVYNELTKVKYVTEGMGKSEFFDANMKQEIFDGVFKKNRKVTKDKLLDFLDKEFEEFRIVDLSGVEKRFNASLGTYHDLLKIIKDKEFLDDPENEEILEDIVLTLTLFEDREMIRQRLSKYADLFDKKVIKKLERRRYTGWGRLSAKLINGIRDKQSGKTILDYLIDDGRSNRNFMQLIHDDSLSFKEEIAKAQVIGETDSLHQVIADLAGSPAIKKGILQSLKIVDELVKVMGRHNPENIVVEMARENQTTQKGQRNSRERLKRLEDAIKELGSKILKEHPVENTQLQNDKLYLYYLQNGRDMYTGEELDIDRLSDYDVDHIIPQSFIKDDSIDNRVLTSSAKARGKSDNVPSIEVVKKMKSFWYKLLKAKLISQRKFDNLTKAERGGLTELDKAGFIKRQLVETRQITKHVAQILDERFNTEFDENNKLIRKVKIVTLKSKLVSQFRKEFEFYKVREINDYHHAHDAYLNAVVGKALIKKYPKLESEFVYGDYPVYNSYKLVAKSDSEIGKATAKMFFYSNIMNFFKSEIKLADGRIIERPVIERNDETGEIAWDKEKHIAIVKKVLSMPQVNIVKKTEVQTGGFSKESILPKRNSDKLIARKKDWDTKKYGGFDSPTVAYSILVVADIEKGKSKKLKTVKELVGITIMERSKFEKNPVAFLERKGYQNIQEENIIKLPKYSLFELENGRKRLLASAGELQKGNELALPNHYVTLLYHAKRYEKDKEKPEDIPKHLEYVDQHRDEFKEIFDQISEFSKRYILADKNLEKIKELYADNNEASIKELASSFINLLTFTALGAPAAFKFFGKNIDRKRYTSTTEILNATLIHQSITGLYETRIDLSKLGGD

SEQ ID NO: 300 - protein, 1368 aa, synthetic construct
MKKSYSIGLDIGTNSVGWAVITDEYKVPSKKFKVLGNTDRHSIKKNLIGALLFDSGETAEATRLKRTARRRYTRRKNRIRYLQEIFSSEMSKVDDSFFHRLEESFLVEEDKRFERHPIFGNIVDEVAYHEKYPTIYHLRKKLADSPEKADLRLIYLALAHIIKFRGHFLIEGDLNTENTDVQKLFIQLVQTYNQLFEESHIDEEEVDAKAILSAKLSKSRRLENLIAQLPGEKKNGLFGNLIALSLGLTPNFKSNFDLAEDAKLQLSKDTYDEDLDNLLAQIGDQYADLFLAAKNLSDAILLSDILTVNSEITKAPLSASMIKRYDEHHQDLTLLKALVRQQLPEKYKEIFFDDSKNGYAGYIDGGASQEEFYKYIKPILEKMDGSEYFLAKIEREDFLRKQRTFDNGSIPHQIHLGELHAILRRQEDFYPFLKENREKIEKILTFRIPYYVGPLARGNSRFAWMTRKSEETITPWNFEEVVDKEASAQAFIERMTNFDKNLPNEKVLPKHSLLYEKFTVYNELTKVKYVTEGMKKPEFLSGEQKKEIVDLLFKKNRKVTVKQLKEFYFKKIECFDSVDISGVEDRFNASLGTYHDLLKIIKDKEFLDNEENEDILEDIVLTLTLFEDREMIEERLRKYAHLFDKKVLKQLKRRRYTGWGRLSRKLINGIRDKQSGKTILDFLKSDGFANRNFMQLIHDDSLTFKEEIQKAQVEGQGDSLHEQIAELAGSPAIKKGILQSIKIVDELVKVMGRHNPENIVIEMARENQTTQKGQKNSRERMKRIEEGIKELGSQILKEHPVENTQLQNEKLYLYYLQNGRDMYVDQELDINRLSDYDVDHIVPQSFLKDDSIDNKVLTRSDKARGKSDNVPSEEVVKKMKNYWRQLLNAKLITQRKFDNLTKAERGGLSELDKAGFIKRQLVETRQITKHVAQILDSRFNTEYDENDKLIREVKIITLKSKLVSDFRKDFQFYKVREINNYHHAHDAYLNAVVGTALIKKYPKLESEFVYGDYKVYDVRKMIAKSEQEIGKATAKYFFYSNIMNFFKTEITLANGEIRKRPQIETNEETGEIVWDKEKDFATVKKVLSMPQVNIVKKTEVQTGGFSKESILPKRNSDKLIARKKDWDTKKYGGFDSPTVAYSVLVVAKVEKGKSKKLKTVKELVGITIMERSSFEKNPVAFLEAKGYKNIQKDSIIKLPKYSLFELENGRKRLLASAGELQKGNELALPNKYVTLLYLASHYEKLKGSPEDIELHLEYVKQHNYYFDDILDQISEFSERYILADKNLDKINSLYNENRDKDINELAENFIHLFTFTSLGAPAAFKFFDTTIDRKRYTSTTEILNATLIHQSITGLYETRIDLSQLGGD

SEQ ID NO: 301 - protein, 1368 aa, synthetic construct
MKKPYSIGLDIGTNSVGWAVITDDYKVPAKKMKVLGNTDKSHIKKNLLGALLFDSGNTAEDRRLKRTARRRYTRRRNRLLYLQEIFSEEMSKVDESFFHRLDDSFLVPEDKRGERHPIFGNLAEEVKYHKNFPTIYHLRKHLADSTEKADLRLVYLALAHIIKFRGHFLIEGDLDTENTDVQALFKDFLEVYDNTFEASHLSEQTVDASSILTDKISKSRKLENLLKHFPNEKKNSLFGNFLALSLGLQPNFKTNFQLSEDAKLQFSKDTYEEDLENLLGQIGDDYADLFVAAKNLYDAILLSGILTVNDSSTKAPLSASMVKRYEEHQKDLKELKQFIKQNLPDDYHEIFSDKTKNGYAGYIDGKTSQEEFYKYLKNILSKVEGSEYFLDKIEREDFLRKQRTFDNGSIPHQIHLQEMHAILRRQGEYYPFLKENQEKIEKILTFRIPYYVGPLARGNSRFAWASRKSDEKITPWNFDEVVDKESSAEAFITRMTNFDLYLPNEKVLPKHSLLYEKFTVYNELTKVKYVTEQMGKAKFFDANMKKEIFDGLFKKNRKVTKKKLLNYLDKEFDEFRIVDLTGLDKKFNASYGTYHDLLKILKDKEFLDDPENEDILEDIVLTLTLFEDREMIRKRLSKYSDLFTKKQLKKLERRHYTGWGRLSAKLINGIRDKQSGKTILDYLIDDGRSNRNFMQLINDDALSFKEEIAKAQVIGETDDLHQVVQDLAGSPAIKKGILQSLKIVDELVKVMGNHEPENIVVEMARENQTTARGRRNSQQRLKRLEDSIKNFGSKILKEHPVDNQQLQNDRLFLYYLQNGKDMYTGEELDINRLSQYDIDHIIPQAFIKDDSIDNRVLTSSAKARGKSDDVPSEEVVKKMKSFWEKLLRSGLISQRKFDNLTKAERGGLTEDDKAGFIKRQLVETRQITKHVARILDERFNTERDENNKRIRKVKIVTLKSNLVSQFRKEFELYKVREINDYHHAHDAYLNAVVGKALLKKYPKLEPEFVYGEYPKYNSYKIDVRTNKEENKATAKYFFYSNIMNMFKSTVKLADGSIIERPVIEANDETGEIAWDKTKHISTVKKVLSYPQVNIVKKVEEQTGGFSKESILPKGDSDKLIARKTKWDTKKYGGFDSPTVAYSILVIADIEKGKSKKLKTVKELVGITIMEKNTFEKNPVAFLERKGYQNIQEENIIKLPKYSLFELENGRKRLLASAKELQKGNEMVLPNHLVTLLYHAKNINKSDEKEEENPWHLSYVDKHRDEFKELLYYISNFSKKYTLAEKNLEKIEELYEQNNQEDIKELASSFINLLTFTALGAPAAFKFFDKNIDRKRYTSTTEILNATLIHQSITGLYETRIDLSKLGGD

SEQ ID NO: 302 - protein, 1368 aa, synthetic construct
MDKKYSIGLDIGTNSVGWAVITDEYKVPSKKFKVLGNTDRQSIKKNLIGALLFDSGETAEATRLKRTARRRYTRRKNRIRYLQEIFAEEMAKVDDSFFHRLEESFLVEEDKKHERHPIFGNIVDEVAYHEKYPTIYHLRKKLADSTDKADLRLIYLALAHMIKFRGHFLIEGDLNSENSDVDKLFIQLVQTYNQLFEENPINEEGVDAKAILSAKLSKSRRLENLIAQFPGEKKNGLFGNLIALSLGLTPNFKSNFDLAEDAKLQLSKDTYDEDLDNLLAQIGDQYADLFLAAKNLSDAILLSDILTVNSEITKAPLSASMIKRYDEHHQDLTLLKALVRQQLPEKYKEIFFDQSKNGYAGYIDGGASQEEFYKFIKPILEKMDGTEELLAKLNREDFLRKQRTFDNGSIPHQIHLGELHAILRRQEDFYPFLKENREKIEKILTFRIPYYVGPLARGNSRFAWMTRKSDETITPWNFEEVVDKEASAQAFIERMTNFDKNLPTEKVLPKHSLLYEYFTVYNELTKVKYVTEGMRKPEFLSGEQKEAIVDLLFKTNRKVTVKQLKEDYFKKIECFDSVEISGVEDRFNASLGTYHDLLKIIKDKDFLDNEENEDILEDIVLTLTLFEDREMIEERLKKYANLFDKKVLKQLKRRRYTGWGRLSRKLINGIRDKQSGKTILDFLKSDGFANRNFMQLIHDDSLTFKEEIQKAQVSGQGDSLHEQIANLAGSPAIKKGILQTVKIVDELVKVMGRHKPENIVIEMARENQTTQKGQKNSRERMKRIEEGIKELGSQILKEHPVENTQLQNEKLYLYYLQNGRDMYVDQELDINRLSDYDVDHIVPQSFLKDDSIDNKVLTRSDKARGKSDNVPSEEVVKKMKNYWRQLLNAKLITQRKFDNLTKAERGGLSELDKAGFIKRQLVETRQITKHVAQILDSRFNTERDENDKLIREVKIITLKSKLVSDFRKDFQFYKVREINNYHHAHDAYLNAVVGTALIKKYPKLESEFVYGDYKVYDVRKMIAKSEQEIGKATAKYFFYSNIMNFFKTEITLANGEIRKRPLIETNEETGEIVWDKEKDFATVRKVLSMPQVNIVKKTEVQTGGFSKESILPKRNSDKLIARKKDWDTKKYGGFDSPTVAYSVLVVAKVEKGKSKKLKTVKELVGITIMERSSFEKNPVDFLEAKGYKNVRKDLIIKLPKYSLFELENGRKRMLASAGELQKGNELALPQKYVTFLYLASHYEKLKGKPEDNEQKQEYVEQHRDYFDEILEQISEFSERYILADKNLSKILELYNENEDSSINEQAENFIHLFTFTALGAPAAFKFFDTTIDRKRYTSTTEVLDATLIHQSITGLYETRIDLSQLGGD

SEQ ID NO: 303 - protein, 1368 aa, synthetic construct
MKKKYSIGLDIGTNSVGWAVITDEYKVPSKKFKVLGNTDRQSIKKNLIGALLFDSGETAEATRLKRTARRRYTRRKNRIRYLQEIFAEEMSKVDDSFFQRLEESFLVEEDKKHERHPIFGNIVDEVAYHEKYPTIYHLRKHLVDSTEKADLRLIYLALAHMIKFRGHFLIEGDLNSENSDVQKLFKQLVQTYNQLFEESAINEETVDASAILTAKLSKSRRLENLIAQFPGEKKNGLFGNLIALSLGLQPNFKSNFNLAEDAKLQFSKDTYEEDLENLLGQIGDQYADLFLAAKNLSDAILLSGILRANDESTKAPLSASMIKRYDEHHQDLTLLKALVRKQLPEKYKEIFFDKTKNGYAGYIDGGASQEEFYKYIKPILEKMDGTEYLLAKLNREDLLRKQRTFDNGSIPHQIHLGELHAILRRQEDYYPFLKENREKIEKILTFRIPYYVGPLARGNSRFAWMKRKSNETITPWNFEEVVDKGASAQAFIERMTNFDKNLPSEKVLPKHSLLYEKFTVYNELTKVKYVTEGMGKPEFLSSNMKKEIVDGLFKKNRKVTVKKLKEFYFKEIECFRIVDISGVEDRFNASLGTYHDLLKIIKDKDFLDNPENEDILEDIVLTLTLFEDREMIEKRLKKYANLFDKEVMKKLKRRRYTGWGRLSRKLINGIRDKQSGKTILDFLKSDGFANRNFMQLIHDDSLTFKEEIKKAQESGQGDSLHEQIANLAGSPAIKKGILQTVKVVDELVKVMGRHKPENIVIEMARENQTTQKGQRNSRERLKRIEEGIKELGSKILKEHPVENTQLQSDKLYLYYLQNGRDMYTGDELDIDRLSDYDVDHIVPQSFIKDDSIDNKVLTRSKEARGKSDDVPSEEVVKKMKSYWRQLLKAKLITQRKFDNLTKAERGGLTELDKAGFIKRQLVETRQITKHVAQILDSRMNTERDENDKLIRDVKVITLKSKLVSDFRKDFQFYKVREINDYHHAHDAYLNAVVGTALIKKYPKLESEFVYGDYPVYDSYKMIAKSEQEIGKATAKYFFYSNIMNFFKTEITLANGEIRKRPLIETNGETGEIVWDKGRDFATVRKVLSMPQVNIVKKTEVQTGGFSKESILPKRNSDKLIARKKDWDPKKYGGFDSPTVAYSVLVVAKVEKGKSKKLKSVKELLGITIMERSSFEKNPIDFLEAKGYKEVKKDLIIKLPKYSLFELENGRKRMLASAGELQKGNELALPSKYVNFLYLASHYEKLKGSPEDNEQKQLFVEQHKHYLDEIIEQISEFSKRVILADANLDKVLSAYNKHRDKPIREQAENIIHLFTLTNLGAPAAFKYFDTTIDRKRYTSTKEVLDATLIHQSITGLYETRIDLSQLGGD

SEQ ID NO: 304 - protein, 1368 aa, synthetic construct
MDKKYSIGLDIGTNSVGWAVITDEYKVPSKKFKVLGNTDRHSIKKNLLGALLFDSGETAEATRLKRTARRRYTRRKNRIRYLQEIFAEEMAKVDDSFFHRLEESFLVEEDKRGERHPIFGNIVDEVAYHENYPTIYHLRKKLADSPQKADLRLIYLALAHIIKFRGHFLIEGDLNAENTDVQKLFKQLVEIYDKLFEESHLSEETVDAKSILTAKSSKSRRLENLIKQFPNEKKNGLFGNLLALSLGLQPNFKTNFELAEDAKLQFSKDTYEEDLENLLAQIGDQYADLFLAAKNLYDAILLSGILTVNTEITKAPLSASMVKRYDEHHQDLTLLKKLIREQLPEKYKEIFFDKSKNGYAGYIDGGASQEDFYKYLKPILSKLDGSEYFLDKIEREDFLRKQRTFDNGSIPHQIHLGELHAILRRQEDFYPFLKENKEKIEKILTFRIPYYVGPLARGNSRFAWASRKSDETITPWNFEEVVDQEASAEVFIERMTNYDKNLPEEKVLPKHSLLYEKFTVYNELTKVKYITEGMRKPAFFDANQKEEIVDLLFKKNRKVTVKKLKEFLFKEIEEFDGVDISGVEKAFNASLGTYHDLLKIIKDKDFLDNEENEDILEDIVLTLTLFEDREMIEERLQKYAHLFDKKVLKKLKRRRYTGWGRLSAKLINGIRDKQTGKTILDYLIDDGFANRNFMQLIHDDSLSFKEEIQKAQVIGKGDSLHEVIADLAGSPAIKKGILQSLKIVDELVKVMGRHAPENIVIEMARENQTTQKGQKNSRERLKRLEESIKNLGSKILKEHPVENTQLQNDKLYLYYLQNGKDMYTGEELDIDNLSDYDVDHIIPQSFIKDDSIDNRVLTSSKKARGKSDNVPSEEVVKKMKNFWMRLLKAKLISQRKFDNLTKAERGGLSELDKAGFIKRQLVETRQITKHVAQILDSRFNTKYDENDKLIRKVKIITLKSKLVSDFRKDFGLYKVREINDYHHAHDAYLNAVVGTALIKKYPKLESEFVYGDYKVYNSYRMIAKSEQEIGKATAKYFFYSNIMNFFKKKITLANGEIRKRPLIETNDETGEIAWDKVKDIATVRKVLSMPQVNIVKKTEVQTGGFSKESILPKRDSDKLIARKKDWDTKKYGGFDSPTVAYSVLVVADVEKGKAKKLKTVKELVGITIMERSSFEKDPIAFLEAKGYQNIQKDTIIKLPKYSLFELENGRKRLLASAGELQKGNELALPQKYVTLLYHAKHYEKLKESPEDNSEHKEYVEQHKDEFDEILDQVSEFSERYILADKNLEKIQELYKQNRDFDIEELASSFINLLTFTALGAPAAFKFFDTKIDRKRYTSTTEILNATLIHQSITGLYETRIDLSQLGGD

SEQ ID NO: 305 - protein, 1368 aa, synthetic construct
MDKPYSIGLDIGTNSVGWAVVTDEYKVPSKKFKVLGNTDRKSIKKNMLGALLFDSGETAEATRLKRTARRRYTRRKNRICYLQEIFSNEMAKVDENFFHRLEESFLVEEDKRNERHPIFGNIVEEVAYHEKYPTIYHLRKHLADSPEKADLRLVYLALAHIIKFRGHFLIEGDLNSENTDVDKLFIQLVQTYNQLFEENPINASGVDAKAILSARLSKSRRLENLIAQLPGEKKNGLFGNLIALSLGLTPNFKSNFDLAEDAKLQLSKDTYDDDLDNLLAQIGDQYADLFLAAKNLSDAILLSDILRVNTEITKAPLSASMIKRYDEHHQDLTLLKALVRQQLPEKYKEIFFDQSKNGYAGYIDGGASQEEFYKFIKPILEKMDGTEELLVKLNREDLLRKQRTFDNGSIPHQIHLGELHAILRRQEDFYPFLKDNREKIEKILTFRIPYYVGPLARGNSRFAWMTRKSEETITPWNFEEVVDKGASAQSFIERMTNFDKNLPNEKVLPKHSLLYEYFTVYNELTKVKYVTEGMRKPAFLSGEQKKAIVDLLFKTNRKVTVKQLKEDYFKKIECFDSVEISGVEDRFNASLGTYHDLLKIIKDKDFLDNEENEDILEDIVLTLTLFEDREMIEERLKTYAHLFDDKVMKQLKRRRYTGWGRLSRKLINGIRDKQSGKTILDFLKSDGFANRNFMQLIHDDSLTFKEDIQKAQVSGQGESLHEQIANLAGSPAIKKGILQTLKIVDEIVKVMGRYAPENIVVEMARENQTTQKGQKNSRERMKRIEEGIKELGSQILKEHPVENTQLQNEKLYLYYLQNGRDMYVDQELDINRLSDYDVDHIVPQSFLKDDSIDNKVLTRSDKARGKSDNVPSEEVVKKMKNYWRQLLNAKLITQRKFDNLTKAERGGLSELDKAGFIKRQLVETRQITKHVAQILDERFNAEVDDSDKLIRDTKIITLKSKLVSDFRKDFGLYKVREINNYHHAHDAYLNAVVGKALIKKYPKLESEFVYGDYKVFDVRKLIRKSGKEIGKATAKYFFYSNIMNFFKSDVTLANGKLRKRPNIEVNEETGEIIWDKEKDIATIKKVLSMPQVNIVKKTEVQTGGFSKESILPKRDSDKLIARKKDWDTSKYGGFDSPTVAYSVLVIAKIEKGKAKKLKTVKELVGITIMERSAFEKDPVAFLEDKGYQDIQEELLIKLPKYSLFELENGRKRLLASAGELQKGNELALPNHYVTLLYHAKHYEKLKGNSEDNKESLNYIEEHREEFDELFDQVIEFAERYILADANIEKIKTLYEQNSEASLEELSENFLHLLKFTALGAPAAFKFFGADIDRKRYTSTKEILNATLIHQSITGLYETRIDLSKLGGD

SEQ ID NO: 306 - protein, 1368 aa, synthetic construct
MDKKYSIGLDIGTNSVGWAVITDEYKVPSKKFKVLGNTDRHSIKKNLIGALLFDSGETAEATRLKRTARRRYTRRKNRIRYLQEIFSEEMAKVDDSFFHRLEESFLVEEDKKHERHPIFGNIVDEVAYHEKYPTIYHLRKKLADSTEKADLRLIYLALAHIIKFRGHFLIEGDLNSDNSDVDKLFIQLVQTYNQLFEENPINESGVDAKAILSARLSKSRRLENLIAQFPGEKKNGLFGNLIALSLGLTPNFKSNFDLAEDAKLQLSKDTYDDDLDNLLAQIGDQYADLFLAAKNLSDAILLSDILTVNSEITKAPLSASMIKRYDEHHQDLTLLKALVRQQLPEKYKEIFFDDSKNGYAGYIDGGASQEEFYKFIKPILEKMDGTEELLAKLNREDLLRKQRTFDNGSIPHQIHLGELHAILRRQEDFYPFLKENREKIEKILTFRIPYYVGPLARGNSRFAWMTRKSEETITPWNFEEVVDKGASAQSFIERMTNFDKNLPNEKVLPKHSLLYEYFTVYNELTKVKYVTEGMRKPEFLSGEQKEAIVDLLFKTNRKVTVKQLKEDYFKKIECFDSVEISGVEDRFNASLGTYHDLLKIIKDKDFLDNEENEDILEDIVLTLTLFEDKEMIEERLEKYAHLFDKKVLKKLKRRRYTGWGRLSAKLINGIRDKQSGKTILDFLKSDGFANRNFMQLIHDDSLTFKEAIQKAQVSGQGDSLHEQIANLAGSPAIKKGILQTVKIVDELVKVMGRHKPENIVIEMARENQTTQKGQKNSRERMKRIEEGIKELGSQILKEHPVENTQLQNEKLYLYYLQNGRDMYVDQELDINRLSDYDVDHIVPQSFLKDDSIDNKVLTRSDKARGKSDNVPSEEVVKKMKNYWRQLLNAKLITQRKFDNLTKAERGGLSELDKAGFIKRQLVETRQITKHVAQILDSRMNTKRDENDKLIREVKIITLKSKLVSDFRKDFQFYKVREINNYHHAHDAYLNAVVGTALIKKYPKLESEFVYGDYKVYDVRKMIAKSEQEIGKATAKYFFYSNIMNFFKTEVTLANGEIRKRPLIETNEETGEIVWDKGKDFATVRKVLSMPQVNIVKKTEVQTGGFSKESILPKRNSDKLIARKKDWDTKKYGGFDSPTVAYSVLVVAKVEKGKSKKLKSVKELVGITIMERSSFEKDPVDFLEAKGYKNVQKDLIIKLPKYSLFELENGRKRLLASAGELQKGNELALPQKYVTLLYLASHYEKLKGSPEDNEKKQYYVEQHRHYFDEIIEQISEFSERYILADKNLDKIKSLYKEHEDYSISELAENFIHLFTFTALGAPAAFKFFDTTIDRKRYTSTTEILDATLIHQSITGLYETRIDLSQLGGD

SEQ ID NO: 307 - protein, 1368 aa, synthetic construct
MDKKYSIGLDIGTNSVGWAVITDEYKVPSKKFKVLGNTDRHSIKKNLIGALLFDSGETAEATRLKRTARRRYTRRKNRICYLQEIFSNEMAKVDPNFFHRLEESFLVEEDKKHERHPIFGNIVDEVAYHEKYPTIYHLRKKLVDSTDKADLRLIYLALSDLIKNRGNFLIKGELPPGPLSVEELMKKLFAKYAELNPDNPVELNGVDLSSILLARESPSSRLGRFVSQFPGVSKTSLLGQLFALILGLTPSFKSAFNLEEDFKLSLKDDSFDDDLDYLVDLLGDKYKELFELARELHAAILYSKFYRDNPDITKAPLSASMIKRYDEHHQDLTLLKALVRQQLPEKYKEIFFDQSKNGYAGYIDGGASQEEFYKFIKPILEKMDGTEELLVKLNREDLLRKQRTFDNGRIPYWINLREIKAILENQEKFYPFLKENKEKILKILTFRIPYYVGELSKGDSPDSVAVRKTNNTITPWNFEEDVDLKKSAKLYEESMRNTDPYLPGEKVLPKHSLTYQEFLLYNELSSVKLLTPDGKEPKPLTGEEREQIINHLFLKYRKVTVEQLKEEFFKEVYKWPEATILGVKGRFKANLETYHDLLKIIKNEEFILNEKNREILDEIVEILTLFKDRELVEEALKKYSHLFSEKEMKRLKRRRFTGWGRYSRKLIDGLKHKKTGKTVLDFLKDNGKNPLTFMQILHSEELDFKKILKKKTVPDKGDSLHEHIANLAGSPAIKKGILQTVKVVDELVKVMGRHKPENIVIEMARENQTTQKGQKNSRERMKRIEEGIKELGSQILKEHPVENTQLQNEKLYLYYLQNGRDMYVDQELDINRLSDYDVDHIVPQSFLKDDSIDNKVLTRSDKARGKSDNVPSEEVVKKMKNYWRQLLNAKLITQRKFDNLTKAERGGLSELDKAGFIKRQLVETRQITKHVAQILDSRMNTKYDENDKLIREVKVITLKSKLVSDFRKDFQFYKVREINNYHHAHDAYLNAVVGTALIKKYPKLESEFVVGKYKVEDVRKMFAKSEDEIGKATAKYFFYSNIMNFFKTEITNENGGIEKRDPTSTNGETGEISWDKGRDFATVRKVLSMPQVNIVKKTEVQTGGFSKESILPKRNSDKLIARKKDWDPKKYGGFDSPTVAYSVLVVAKVEKGKSKELKSVKELLGITIMERSSFEKNPLDFLKAKGYTDVDKDKLIYLPKYSLFELGNGRKVLLASAGELQKGNELALPFKYQEFLYLAAHLDDLKGKPEEQEQKQLFVEQNKHYLDEIMEQISEFSKRVVNAGAQLDKVKAAWEKHKDKPIREQAENIIHLFTLTNLGAPAAFKYFDTTIDRKRYTSTKEVLDATLIHQSITGLYETRIDLKQLGGD

SEQ ID NO: 308 - protein, 1368 aa, synthetic construct
MKKKYSIGLDIGTNSVGWAVITDEYKVPSKKFKVLGNTDRHSIKKNLIGALLFDSGETAEATRLKRTARRRYTRRKNRICYLQEIFSSEMSKVDDSFFHRLEESFLVEEDKRNERHPIFGNIVDEVAYHEKYPTIYHLRKKLADSTEKADLRLIYLALAHMIKFRGHFLIEGDLNAENSDVDKLFIQLVQTYNQLFEENPIEEELVDAKAILSAKLSKSRRLENLIAQLPGEKKNGLFGNLLALSLGLTPNFKSNFDLSEDAKLQLSKDTYDDDLDNLLAQIGDQYADLFLAAKNLSDAILLSDILTVNGESTKAPLSASMIKRYDEHHQDLTLLKTLVRQQLPEKYKEIFFDDSKNGYAGYIDGGASQEEFYKYIKPILEKMDGTEEFLAKLEREDFLRKQRTFDNGSIPHQIHLGELHAILRRQEDFYPFLKENREKIEKILTFRIPYYVGPLARGNSRFAWMTRKSEETITPWNFEEVVDKEASAQSFIERMTNFDKNLPKEKVLPKHSLLYEYFTVYNELTKVKYVTEGMRKPEFLSAGQKKAIVDLLFKTNRKVTVKQLKEDYFKKIECFDTVEISGVEDRFNASLGTYHDLLKIIKDKDFLDNEENEAILEDIVLTLTLFEDREMIEERLAKYADLFDKKVLKQLKRRRYTGWGRLSRKLINGIRDKQSGKTILDFLKDDGFANRNFMQLIHDDSLTFKEEIQKAQVIGKGDSLHEQIANLAGSPAIKKGILQSIKIVDELVKVMGRHAPENIVIEMARENQTTQKGQKNSRERMKRIEEGIKELGSQILKEHPVENTQLQNEKLYLYYLQNGRDMYVDQELDINRLSDYDVDHIVPQSFLKDDSIDNKVLTRSDKARGKSDNVPSEEVVKKMKNYWRQLLNAKLITQRKFDNLTKAERGGLSELDKAGFIKRQLVETRQITKHVAQILDSRFNTERDENDKLIRRVKIITLKSKLVSDFRKDFQFYKVREINDYHHAHDAYLNAVVGTALIKKYPKLESEFVYGDYKVYDVRKMIAKSEQEIGKATAKYFFYSNIMNFFKTEITLANGEIRKRPLIETNTETGEIVWDKGKDFATVRKVLSMPQVNIVKKTEVQTGGFSKESILPKRESDKLIARKKDWDTKKYGGFDSPTVAYSVLVVAKVEKGKTKKLKTVKELVGITIMERSSFEKDPVSFLEAKGYQNIQKDLIIKLPKYSLFELENGRKRLLASAGELQKGNELALPQKYVTLLYHASHYEKLKGKEEDNSQHREYVEQHRYEFDEILDQIIEFSERYILADKNLEKILELYNENEAADIEELAENFIHLFTFTALGAPAAFKFFDTTIDRKRYTSTTEILDATLIHQSITGLYETRIDLSQLGGD

SEQ ID NO: 309 - protein, 1368 aa, synthetic construct
MDKPYSIGLDIGTNSVGWAVVTDEYKVPSKKFKVLGNTDRHSIKKNLLGALLFDSGETAEATRLKRTARRRYTRRKNRIRYLQEIFAEEMNKVDDSFFHRLEESFLVEEDKRGERHPIFGNIVEEVAYHEEYPTIYHLRKHLADSPEKADLRLVYLALAHIIKFRGHFLIEGELDTENTDIQRLFKEFLAVYDNTFEESHLSEQNVQAEEILTDKISKSAKKERVLKLFPNEKSNGFFAEFLKLIVGNQADFKKHFELSEKAPLQFSKDTYEEDLENLLGQIGDDYADLFVSAKKLYDSILLSGILTVTTEITKAPLSASMVKRYDEHHQDLTKLKQFIRENLPDKYKEIFFDKSKNGYAGYIDGGATQEDFYKYLKGLLNKIEGSEYFLDKIEREDFLRKQRTFDNGSIPHQIHLQELRAIIRRQGEYYPFLKENQDKIEKILTFRIPYYVGPLARGNSRFAWLSRKSDETITPWNFDEIVDKESSAEAFINRMTNYDKNLPEEKVLPKHSLLYEKFTVYNELTKVKYITEQMRKPAFFDANMKQEIFDGVFKVYRKVTKDKLLDFLEKEFDEFRIVDLSGVEKAFNASLGTYHDLKKILKDKDFLDNSKNEKILEDIVLTLTLFEDREMIRKRLSKYADLLTKEQLKKLERRRYTGWGRLSAKLINGIRDKETGKTILDYLIDDGFSNRNFMQLIHDDSLSFKEEIAKAQVIGETDSLHQVIADLAGSPAIKKGILQSLKIVDELVKVMGRHAPENIVVEMARENQTTQKGQRNSRERLKRLTDSIKELGSNILKEHPVDNTQLQNDKLYLYYLQNGKDMYTGEELDIDKLSDYDVDHIIPQSFIKDDSIDNRVLVSSAKARGKSDDVPSIEVVRKMKSFWSQLLDAKLISQRKFDNLTKAERGGLTELDKAGFIKRQLVETRQITKHVAQILDERFNTKYDENDKLIRDVKIVTLKSKLVSNFRKEFELYKVREINDYHHAHDAYLNAVVGKALIKKYPKLESEFVYGDYPVFNSYKMIAKSEQEIGKATAKYFFYSNLMNFFKSDVTLANGEIRKRPLVETNDENGEIIWDKTKHISTVKKVLSMPQVNIVKKTEVQTGGFSKESILPKRNSDKLIARKKDWDTKKYGGFDSPTVAYSVLVIADIEKGKAKKLKTVKELVGITIMERSAFERDPVAFLENKGYQNIRKENIIKLPKYSLFELENGRKRLLASAGELQKGNELALPAHYVTLLYHAKNYEKIKESPEDNPKHLEYVVKHRDEFKELLDQISEFSKRYILADKNLEKIEELYAQNEEADIEELASSFINLLTFTALGAPAAFKFFGKKIDRKRYTSTTEILNATLIHQSITGLYETRIDLSQLGGD

SEQ ID NO: 310 - protein, 1368 aa, synthetic construct
MDKKYSIGLDIGTNSVGWAVITDEYKVPSKKFKVLGNTDRHSIKKNLIGALLFDSGETAEATRLKRTARRRYTRRKNRICYLQEIFSNEMAKVDESFFHRLEESFLVEEDKQGERHPIFGNIVDEVAYHEKYPTIYHLRKHLADSTEKADLRLVYLALAHIIKFRGHFLIEGDLNSENTDVQKLFKQFVQVYNRLFEESHLNEETVDAESILTEKISKSRRLENLIAQFPNEKKNGLFGNLIALSLGLQPNFKSNFELSEDAKLQLSKDTYEEDLEELLGQIGDEYADLFVAAKNLYDAILLSGILTVNDESTKAPLSASMIKRYDEHHQDLTLLKEFVRQNLPEKYKEIFFDKTKNGYAGYIDGGASQEEFYKYIKPILEKIDGSEYFLEKIEREDFLRKQRTFDNGSIPHQIHLQELHAILRRQEKYYPFLKENQEKIEKILTFRIPYYVGPLARGNSRFAWVTRKSDETITPWNFEEVVDKEKSAERFIERMTNNDKNLPDEKVLPKHSLLYEKFTVYNELTKVKYVTEGMGKAKFFDANMKQEIFDGLFKKHRKVTKKKLLDFLDKEFEEFRIVDISGVEDAFNASLGTYHDLLKIIKDKEFLDNPENEDILEDIVLTLTLFEDREMIEKRLQKYADLFTKKQLKKLKRRRYTGWGRLSKKLINGIRDKQSGKTILDYLIDDGYSNRNFMQLIHDDGLSFKEEIKKAQVTGDSDSLHEHIANLAGSPAIKKGILQTVKVVDELVKVMGRHKPENIVIEMARENQTTQKGQKNSRERMKRIEEGIKELGSQILKEHPVENTQLQNEKLYLYYLQNGRDMYVDQELDINRLSDYDVDHIVPQSFLKDDSIDNKVLTRSDKARGKSDNVPSEEVVKKMKNYWRQLLNAKLITQRKFDNLTKAERGGLSELDKAGFIKRQLVETRQITKHVAQILDSRMNTKYDENDKLIREVKVITLKSKLVSDFRKDFQFYKVREINNYHHAHDAYLNAVVGTALIKKYPKLESEFVYGDYKVYDVRKMIAKSEQEIGKATAKYFFYSNIMNFFKTEITLANGEIRKRPLIETNGETGEIVWDKGRDFATVRKVLSMPQVNIVKKTEVQTGGFSKESILPKRDSDKLIARKKDWDTKKYGGFDSPTVAYSVLVVAKIEKGKTSKLKTVKELVGITIMERSRFEKNPVKFLEAKGYQNIRKDKIIKLPKYSLFELENGRKRLLASAGELQKGNELALPKKYVTLLYHAKHYEKLKEKSEDEEKHLNYVQKHLSEFDEIFDQISEFSKRYVLADKNLEKIEELYSQIESKSISELAESFINLLTFTALGAPAAFKFLGLTIDRKRYTSTTEILSATLIHQSITGLYETRIDLSKLGGD

SEQ ID NO: 311 - protein, 1368 aa, synthetic construct
MDKPYSIGLDIGTNSVGWAVITDEYKVPSKKFKVLGNTDRHSIKKNLWGALLFDSGETAEATRLKRTARRRYTRRKNRIRYLQEIFSEEMSKVDDSFFQRLEESFLVEEDKRHERHPIFGNIVDEVAYHEKYPTIYHLRKHLADSTEKADLRLIYLALAHIIKFRGHFLIEGDLNAENTDVQKLFIQLVQTYNQTFEEDHISEQGVDAEAILTAKTSKSRRLENLIKQFPGEKKNGLFGNLIALSLGLQPNFKTNFDLPEDAKLQFSKDTYDEDLENLLAQIGDQYADLFLAAKNLYDAILLSGILTVKTEITKAPLSASMIKRYDEHHQDLTLLKAFIREQLPEKYKEIFFDKSKNGYAGYIDGGASQEEFYKYIKPILSKIEGAEYFLDKIEREDFLRKQRTFDNGSIPHQIHLKELKAILRRQGEFYPFLKENKEKIEKILTFRIPYYVGPLARGNSRFAWMSRKSEETITPWNFEEVVDKEASAEAFIERMTNFDKNLPEEKVLPKHSLLYEKFTVYNELTKVKYVTEGMRKPAFFSGEQKKEIVDELFKKNRKVTVKQLLEHLFKEFDEFDSVEISGVEDQFNASLGTYHDLLKIIKDKEFLDNEENEDILEDIVLTLTLFEDREMIKQRLSKYADLFDKKVLKKLKRRRYTGWGRLSAKLINGIRDKQTGKTILDYLIDDGFANRNFMQLIHDDSLSFKEEIAKAQVIGKTDSLHEVIANLAGSPAIKKGILQSIKIVDELVKVMGRHNPENIVIEMARENQTTQKGQRNSRERLKRLEEVIKKLGSQILKEHPVENTQLQNDKLYLYYLQNGKDMYTGEELDIDRLSDYDVDHIIPQSFIKDDSIDNRVLTSSDKARGKSDNVPSIEVVKKMKSYWQQLLNSKLISQRKFDNLTKAERGGLSELDKAGFIKRQLVETRQITKHVAQILDSRFNTKYDENDKLIRRVKIITLKSKLVSDFRKDFGFYKVREINDYHHAHDAYLNAVVGTALIKKYPKLESEFVYGDYKVYDSRKMIAKSEQEIGKATAKYFFYSNIMNFFKKEITLANGEIRKRPLIETNEETGEIVWDKTKDFATVRKVLSMPQVNIVKKTEVQTGGFSKESILPKRNSDKLIARKKDWDTKKYGGFDSPTVAYSVLVVADVEKGKAKKLKTVKELVGITIMERSSFEKDPVLFLESKGYKNIQKDKIIKLPKYSLFELENGRKRLLASAGELQKGNELALPQKYVTLLYHAKKYEKLKGSPEDNPKHLEYVEEHRDEFDEILDQISEFSKRYILADANLEKIKELYRKNADSSISELASSFINLFTFTALGAPAAFKFFDEDIDRKRYTSTTEILNATLIHQSITGLYETRIDLSQLGGD

SEQ ID NO: 312 - protein, 1368 aa, synthetic construct
MDKKYSIGLDIGTNSVGWAVITDEYKVPSKKFKVLGNTDRHSIKKNLIGALLFDSGETAEATRLKRTARRRYTRRKNRICYLQEIFSNEMAKVDDSFFHRLEESFLVEEDKRGERHPIFGNIVDEVAYHEKYPTIYHLRKHLADSTEKADLRLIYLALAHMIKFRGHFLIEGDLNSENTDVQKLFKKFVQVYNQTFEESALSEIGVDAKSILTAKVSKSRRLENLIKLYPNEKKNGLFGNLIALSLGLQPNFKKNFNLSEDAKLQFSKDTYDEDLENLLGQIGDEYADLFVAAKNLYDAILLSGILTVNDESTKAPLSASMVKRYDEHHQDLTLLKHFVRKQLPEKYKEIFFDKSKNGYAGYIDGGASQEDFYKYIKPILEKQDGTEYLLDKIEREDFLRKQRTFDNGSIPHQIHLQELHAILRRQEEYYPFLKENQEKIEKILTFRIPYYVGPLARGNSRFAWMSRKSDETITPWNFEEVVDKEASAEAFIERMTNFDKNLPEEKVLPKHSLLYEKFTVYNELTKVKYVTEQMGKAEFFDSNQKEEIFDGLFKKERKVTKKKLLDFLFKEFEEFRIVDLSGVEDAFNASLGTYHDLLKIIKDKDFLDDEENEDILEDIILTLTLFEDREMIEKRLQKYADLFTKDQLKKLERRRYTGWGRLSKKLINGIRDKQSGKTILDYLIDDGFTNRNFMQLIHDDSLSFKEEIAKAQVKGDEDSLHEHIANLAGSPAIKKGILQTVKVVDELVKVMGRHKPENIVIEMARENQTTQKGQKNSRERMKRIEEGIKELGSQILKEHPVENTQLQNEKLYLYYLQNGRDMYVDQELDINRLSDYDVDHIVPQSFLKDDSIDNKVLTRSDKARGKSDNVPSEEVVKKMKNYWRQLLNAKLITQRKFDNLTKAERGGLSELDKAGFIKRQLVETRQITKHVAQILDSRMNTKYDENDKLIREVKVITLKSKLVSDFRKDFQFYKVREINNYHHAHDAYLNAVVGTALIKKYPKLESEFVYGDYKVYDVRKMIAKSEQEIGKATAKYFFYSNIMNFFKTEITLANGEIRKRPLIETNGETGEIVWDKGRDFATVRKVLSMPQVNIVKKTEVQTGGFSKESILPKRDSDKLIARKKDWDTKKYGGFDSPTVAYSVLVVADIEKGKNKKLKTVKELVGITIMERSSFEKDPVDFLEKKGYQNIQEELIIKLPKYSLFELENGRKRLLASAGELQKGNELALPNKYVTLLYHAHHYEKSKEKPEDNEKHLKYVEKHKNEFDEILDQIEEFSKRYVLADKNLEKIVALYSKNENASIEELASSFINLLTFTALGAPAAFKFFGLKIDRKRYTSTTEILNSTLIHQSITGLYETRIDLSKLGGD

SEQ ID NO: 313 - protein, 1368 aa, synthetic construct
MDKKYSIGLDIGTNSVGWAVVTDDYKVPSKKFKVLGNTDRKSIKKNLLGALLFDSGETAEATRLKRTARRRYTRRKNRICYLQEIFSNEMAKVDESFFHRLEESFLVEEDKRNERHPIFGNIVEEVAYHEKFPTIYHLRKKLADSDEKADLRLVYLALAHIIKFRGHFLIEGDLNAENTDVDKLFIQLVQTYNQLFEENPINASGVDAKAILSARLSKSRRLENLIAQLPGEKKNGLFGNLIALSLGLTPNFKSNFDLAEDAKLQLSKDTYDDDLDNLLAQIGDQYADLFLAAKNLSDAILLSDILRVKDESTKAPLSASMVKRYEEHHKDLTLLKNFIRKQLPEKYKEIFFDESKNGYAGYIDGGASQEEFYKYLKKILEKIDGSEEFLDKIEREDFLRKQRTFDNGSIPHQIHLQELHAILRRQEKYYPFLKENQEKIEQILTFRIPYYVGPLARGNSRFAWLSRKSDETITPWNFDEVVDKEASAEAFIERMTNFDKNLPDEKVLPKHSLLYEKFTVYNELTKVKYVTEGGKKPEFFSANQKQEIFDNVFKKNRKVTKKQLLDFLKKEFDEFRIVDISGVEDRFNASLGTYHDLLKIIKDKDFLDNEENEEILEDIILTLTLFEDREMIKERLEKYADLFDKEQLKKLERRRYTGWGRLSAKLINGIRDKQTGKTILDYLIDDGFANRNFMQLIHDDSLTFKEEIAKAQVIGETDSLHELIANLAGSPAIKKGILQSLKIVDELVKVMGRYAPENIVVEMARENQTTAKGQKNSRERMKRIEEGIKELGSQILKEHPVENTQLQNEKLYLYYLQNGRDMYVDQELDINRLSDYDVDHIVPQSFLKDDSIDNKVLTRSDKARGKSDNVPSEEVVKKMKNYWRQLLNAKLITQRKFDNLTKAERGGLTDDDKAGFIKRQLVETRQITKHVAQILDSRFNTEYDENGKLIRDVKIITLKSKLVSQFRKDFELYKVREINDYHHAHDAYLNAVVGTALIKKYPKLESEFVYGDYKKYNLRKLIAKSDKEIGKATAKMFFYSNIMNFFKTDVKLADGEIRKRPLIEVNEETGEIAWDKEKHIATVKKVLSMPQVNIVKKTEVQTGGFSKESILPKRDSDKLIARKKDWDTKKYGGFDSPTVAYSVLVVADIEKGKAKKLKTVKELVGITIMERSAFEKNPVAFLEDKGYQNIQEDNLIKLPKYSLFELENGRKRLLASAGELQKGNELALPNHLVTLLYHAKHIEKLDGKPEDNKEKLNYVEEHREEFDEILDQVIEFAKRYILADANIEKIKKLYEKNRSADIEELASSFINLLTFTALGAPAAFKFFGKTIDRKRYTSTTEILNATLIHQSITGLYETRIDLSKLGGD

SEQ ID NO: 314 - protein, 1368 aa, synthetic construct
MDKKYSIGLDIGTNSVGWAVITDEYKVPSKKFKVLGNTDRHSIKKNLIGALLFDSGETAEATRLKRTARRRYTRRKNRICYLQEIFSNEMAKVDPSFFKRLEESFLVEEDKSTSRHPIFGNIVEEVAYHEKYPTIYHLRKKLVDSDEKADLRLIYLALAHMIKFRGHFLIEGDLNPDNSDVDKLFIQLVQTYNQLFEENPINASGVDAKAILSARLSKSRRLENLIAQLPGEKKNGLFGNLIALSLGLTPNFKSNFDLAEDAKLQLSKDTYDDDLDNLLAQIGDQYADLFLAAKNLSDAILLSDILRVDTTDTRAPLSASMIKRYDDHHQDLTLLKELVRKYLPEKYKEIFFNQNANGYAGYIDGGATQEEFYKYIKPILESMPGTKELLEKLENKDLLRKQRTFDNGSIPHQIHLGELRAILERQEKFYPFLKENREKIEKILTFRIPYYVGPLARGNSRFAWMTRKSEETITPWNFEEVVDKGASAQSFIERMTNFDKNLPNEKVLPKHSLLYEYFTVYNELTKVKYVTEGMRKPAFLSGEQKKAIVDLLFKTNRKVTVKQLKEDYFKKIECFDSVEISGVEDRFNASLGTYHDLLKIIKDKDFLDNEENEDILEDIVLTLTLFEDREMIEERLKTYAHLFDDKVMKQLKRRRYTGWGRLSRKLINGIRDKQSGKTILDFLKSDGFANRNFMQLIHDDSLTFKEDIQKAQVSGQGDSLHEHIANLAGSPAIKKGILQTVKVVDELVKVMGRHKPENIVIEMARENQTTQKGQKNSRERMKRIEEGIKELGSQILKEHPVENTQLQNEKLYLYYLQNGRDMYVDQELDINRLSDYDVDHIVPQSFLKDDSIDNKVLTRSDKARGKSDNVPSEEVVKKMKNYWRQLLNAKLITQRKFDNLTKAERGGLSELDKAGFIKRQLVETRQITKHVAQILDSRMNTKYDENDKLIREVKVITLKSKLVSDFRKDFQFYKVREINNYHHAHDAYLNAVVGTALIKKYPKLESEFVYGDYKVYDVRKMIAKSEQEIGKATAKYFFYSNIMNFFKTEITLANGEIRKRPLIETNGETGEIVWDKGRDFATVRKVLSMPQVNIVKKTEVQTGGFSKESILPKRDSDKLIARKKDWDPKKYGGFDSPTVAYSVLVVAKKEVGKNKELKEVKDLLGITIMERSEFEKDPIGFLKKKGYVDVKEDEIIKLPKYSLFELGNGRKRMLASAGELQKGNELALPSEYVNFLYLASDYEKLKGKEEEKKEKQKYVEENKEYLDKIIEQISEFSRRVIGADANLEKVLEAYKKHKDKPIKEQAENIIHLFTLTALGAPAAFKYFDETIDRKRYTSTKEVLDATLIHQSITGLYETRIDLKFLGGD

SEQ ID NO: 315 - protein, 1368 aa, synthetic construct
MDKKYSIGLDIGTNSVGWAVITDEYKVPSKKFKVLGNTDRHSIKKNLIGALLFDSGETAEATRLKRTARRRYTRRKNRICYLQEIFSNEMAKVDDSFFHRLEESFLVEEDKRGERHPIFGNIVEEVAYHEKYPTIYHLRKHLADSTEKADLRLVYLALAHMIKFRGHFLIEGDLNSENSDVQKLFEQFVETYDQLFEESPLSEETVDAKAILTAKLSKSRRLENLIKQFPNEKKNGLFGNLIALSLGLQPNFKSNFELSEDAKLQFSKDTYDEDLENLLGQIGDEYADLFLAAKNLYDAILLSGILTVNDESTKAPLSASMIKRYDEHHQDLTLLKAFIRKQLPEKYKEIFFDESKNGYAGYIDGGASQEEFYKYIKPILSKMDGSEYFLEKIEREDFLRKQRTFDNGSIPHQIHLQELHAILRRQEEYYPFLKENQEKIEKILTFRIPYYVGPLARGNSRFAWASRKSDETITPWNFDEVVDKEASAQAFIERMTNFDKNLPEEKVLPKHSLLYEKFTVYNELTKVKYVTEGMGKPQFFDANQKQEIVDLLFKKNRKVTKKKLLEFLFKEFEEFRIVDISGVEDRFNASLGTYHDLLKIIKDKDFLDNEENEDILEDIVLTLTLFEDREMIEKRLKKYANLFDKKQLKKLKRRRYTGWGRLSKKLINGIRDKQSGKTILDYLIDDGFANRNFMQLIHDDSLTFKEEIKKAQVIGDSDSLHEHIANLAGSPAIKKGILQTVKVVDELVKVMGRHKPENIVIEMARENQTTQKGQRNSRERLKRLEEAIKELGSQILKEHPVENTQLQNDKLYLYYLQNGKDMYTGEELDIDRLSDYDVDHIIPQSFIKDDSIDNRVLTSSAKARGKSDNVPSEEVVKKMKSYWRRLLNAKLISQRKFDNLTKAERGGLSELDKAGFIKRQLVETRQITKHVAQILDSRMNTKYDENDKLIREVKVITLKSKLVSDFRKDFQFYKVREINNYHHAHDAYLNAVVGTALIKKYPKLESEFVYGDYKVYDVRKMIAKSEQEIGKATAKYFFYSNIMNFFKTEITLANGEIRKRPLIETNGETGEIVWDKGRDFATVRKVLSMPQVNIVKKTEVQTGGFSKESILPKRKSDKLIARKKDWDTKKYGGFDSPTVAYSVLVVADVEKGKAKKLKTVKELVGITIMERSSFEKNPIAFLEKKGYQNIQEDNIIKLPKYSLFELENGRKRLLASAGELQKGNELALPAKYVTLLYHAKNYEKLKEKPEDEEKHLEYVEQHRDEFDEILDQIVEFSERYILADKNLEKIEELYSKNESKSIEELASSFINLLTLTALGAPAAFKFLGTDIDRKRYTSTKEILNATLIHQSITGLYETRIDLSKLGGD

SEQ ID NO: 316 - protein, 1368 aa, synthetic construct
MKKPYSIGLDIGTNSVGWAVVTDDYKVPSKKMKVLGNTDRQSIKKNLLGALLFDSGETAEATRLKRTARRRYTRRKNRIRYLQEIFAEEMNKVDDSFFHRLEDSFLVEEDKRGERHPIFGNIVEEVAYHEKFPTIYHLRKHLADSTEKADLRLVYLALAHIIKFRGHFLIEGDLNTENTDVQKLFKDFLQVYDQTFEDSHLSEETVDAESILTEKISKSRRLENLIKQFPNEKKNGLFGNLIALSLGLQPNFKTNFELSEDAKLQFSKDTYEEDLENLLGQIGDEYADLFLAAKNLYDAILLSGILTVDDSSTKAPLSASMIKRYEEHHEDLTKLKKFIRQNLPEKYKEIFFDESKNGYAGYIDGGTKQEEFYKYLKNLLSKIDGSEYFLDKIEREDFLRKQRTFDNGSIPHQIHLQELHAILRRQEKFYPFLKENQEKIEKILTFRIPYYVGPLARGNSRFAWMSRKSDETITPWNFDEVVDKEASAEAFIERMTNNDLYLPNEKVLPKHSLLYEKFTVYNELTKVKYVTEGMGKAEFFDANMKQEIFDGLFKKYRKVTKKKLLNFLFKEFDEFRIVDISGVEKTFNASLGTYHDLLKILKDKDFLDNEENEKILEDIVLTLTLFEDREMIKKRLEKYADLFDKKQLKKLERRHYTGWGRLSAKLINGIRDKQSGKTILDYLIDDGNANRNFMQLIHDDNLSFKEEIAKAQVIGETDSLHEIVADLAGSPAIKKGILQSLKIVDELVKVMGRHNPENIVVEMARENQTTAKGQRNSRERLKRLEEAIKELGSQILKEHPVENSQLQNDRLYLYYLQNGKDMYTGEELDIDKLSQYDVDHIIPQSFIKDDSIDNRVLTSSAKARGKSDDVPSEEVVKKMKSFWSKLLSAKLISQRKFDNLTKAERGGLTEDDKAGFIKRQLVETRQITKHVAQILDERFNTEFDENNKLIRDVKIITLKSKLVSQFRKEFELYKVREINDYHHAHDAYLNAVVGKALIKKYPKLEPEFVYGDYPKYNSYKMIAKSDQERGKATAKMFFYSNIMNFFKSDVKLADGTIVVRPQIEVNEETGEIVWDKTKHIATVRKVLSMPQVNIVKKTEVQTGGFSKESILPKRESDKLIARKKKWDTKKYGGFDSPTVAYSVLVVADIEKGKAKKLKTVKELVGITIMERSRFEKNPVAFLEDKGYQNIQKENIIKLPKYSLFELENGRKRLLASAGELQKGNELALPAKLVTLLYHAKHIEKLKEKPEDKPKHLEYVEEHRDEFKELLDQISEFSKRYILADKNLEKIEELYAKNENASIEELASSFINLLTFTALGAPADFKFFGETIDRKRYTSTKEILNATLIHQSITGLYETRIDLSKLGGD

SEQ ID NO: 317 - protein, 1368 aa, synthetic construct
MDKPYSIGLDIGTNSVGWAVVTDEYKVPSKKFKVLGNTDRKSIKKNLLGALLFDSGETAEATRLKRTARRRYTRRKNRICYLQEIFSNEMAKVDDNFFHRLEESFLVEEDKRGERHPIFGNIVDEVAYHEKYPTIYHLRKELADSDEKADLRLVYLALAHIIKFRGHFLIEGDLNSENTDVDKLFIQLVQTYNQLFEENPINASGVDAKAILSARLSKSRRLENLIAQLPGEKKNGLFGNLIALSLGLTPNFKSNFDLAEDAKLQLSKDTYDDDLDNLLAQIGDQYADLFLAAKNLSDAILLSDILRVNTEITKAPLSASMIKRYDEHHQDLTLLKALVRQQLPEKYKEIFFDQSKNGYAGYIDGGASQEEFYKFIKPILEKMDGTEELLVKLNREDLLRKQRTFDNGSIPHQIHLGELHAILRRQEDFYPFLKDNREKIEKILTFRIPYYVGPLARGNSRFAWMTRKSEETITPWNFEEVVDKGASAQSFIERMTNFDKNLPNEKVLPKHSLLYEYFTVYNELTKVKYVTEGMRKPAFLSGEQKKAIVDLLFKTNRKVTVKQLKEDYFKKIECFDSVEISGVEDRFNASLGTYHDLLKIIKDKDFLDNEENEDILEDIVLTLTLFEDREMIEERLKTYAHLFDDKVMKQLKRRRYTGWGRLSRKLINGIRDKQSGKTILDFLKSDGFANRNFMQLIHDDSLTFKEDIQKAQVSGQGESLHEQIANLAGSPAIKKGILQSLKIVDEIVKVMGRYAPENIVVEMARENQTTQKGQKNSRERMKRIEEGIKELGSQILKEHPVENTQLQNEKLYLYYLQNGRDMYVDQELDINRLSDYDVDHIVPQSFLKDDSIDNKVLTRSDKARGKSDNVPSEEVVKKMKNYWRQLLNAKLITQRKFDNLTKAERGGLSELDKAGFIKRQLVETRQITKHVAQILDERFNAEVDDNGKLIRDVKIVTLKSKLVSDFRKDFELYKVREINNYHHAHDAYLNAVVGKALIKKYPKLESEFVYGDYKVFDVRKLIGKSDKEIGKATAKYFFYSNIMNFFKSDVTLANGTVRKRPIIEVNEETGEIVWDKEKHIATVKKVLSMPQVNIVKKTEVQTGGFSKESILPKRDSDKLIARKKDWDTSKYGGFDSPTVAYSVLVIADVEKGKAKKLKTVKELVGITIMERSAFEKDPVAFLEDKGYQDIQEILLIKLPKYSLFELENGRKRLLASAGELQKGNELALPNHYVTLLYHAKNYEKIKGSEEDEKESEIYIEKHREEFDEIFDQIIEFAERYILADANIEKLKELFEKNENASLEELSENFLHLLTFTAFGAPAAFKFFGKDIDRKRYTSPKEILNSTLIHQSITGLYETRIDLSKLGGD

SEQ ID NO: 318 - protein, 1368 aa, synthetic construct
MDKKYSIGLDIGTNSVGWAVITDEYKVPSKKFKVLGNTDRHSIKKNLIGALLFDSGETAEATRLKRTARRRYTRRKNRICYLQEIFSNEMAKVDDSFFHRLEESFLVEEDKRGERHPIFGNIVDEVAYHEEYPTIYHLRKKLADSTEKADLRLIYLALAHMIKFRGHFLIEGDLNAENTDVQKLFKQLVQVYNKTFEESPLSEITVDAKAILTEKLSKSRRLENLIKLFPNEKKNGLFGNLIALSLGLQPNFKKNFELSEDAKLQFSKDTYDEDLENLLGQIGDQYADLFLAAKNLYDAILLSGILTVNDESTKAPLSASMIKRYDEHHQDLTLLKNFVRQQLPEKYKEIFFDESKNGYAGYIDGGASQEEFYKYIKPILEKIDGSEYFLDKIEREDFLRKQRTFDNGSIPHQIHLGELHAILRRQEEYYPFLKENQEKIEKILTFRIPYYVGPLARGNSRFAWATRKSDETITPWNFEEVVDKEASAQAFIERMTNFDKNLPEEKVLPKHSLLYEKFTVYNELTKVKYVTEGMGKPEFFDAEQKQEIFDLLFKKYRKVTVKKLLDFLFKEFDEFRIVDISGVEDAFNASLGTYHDLLKIIKDKAFLDNEENEKILEDIILTLTLFEDREMIEERLSKYADLFDKKVLKKLKRRRYTGWGRLSKKLINGIRDKQSGKTILDFLIDDGFANRNFMQLIHDDSLTFKEEIKKAQVIGNTDSLHEHIANLAGSPAIKKGILQTVKVVDELVKVMGRHKPENIVIEMARENQTTQKGQKNSRERMKRIEEGIKELGSQILKEHPVENTQLQNEKLYLYYLQNGRDMYVDQELDINRLSDYDVDHIVPQSFLKDDSIDNKVLTRSDKARGKSDNVPSEEVVKKMKNYWRQLLNAKLITQRKFDNLTKAERGGLSELDKAGFIKRQLVETRQITKHVAQILDSRMNTKYDENDKLIREVKVITLKSKLVSDFRKDFQFYKVREINNYHHAHDAYLNAVVGTALIKKYPKLESEFVYGDYKVYDVRKMIAKSEQEIGKATAKYFFYSNIMNFFKTEITLANGEIRKRPLIETNGETGEIVWDKGRDFATVRKVLSMPQVNIVKKTEVQTGGFSKESILPKRESDKLIARKKDWDTKKYGGFDSPTVAYSVLVVADVEKGKAKKLKTVKELVGITIMERSAFEKNPVAFLEDKGYQNIQEDKIIKLPKYSLFELENGRKRLLASAGELQKGNELALPQKYVTLLYHAKHYEKLKESEEDEEKHLEYVTNHRDEFDEIFDQISEFSERYVLADKNLEKIEELYSKNESYSIEELASSFINLLTFTALGAPAAFKFLGKTIDRKRYTSTKEILNSTLIHQSITGLYETRIDLSKLGGD

SEQ ID NO: 319 - protein, 1368 aa, synthetic construct
MDKPYSIGLDIGTNSVGWAVVTDEYKVPSKKFKVLGNTDRKSIKKNLWGVLLFDSGETAEATRLKRTARRRYTRRKNRILYLQEIFAEEINKVDENFFHRLEESFLVEEDKRGDRHPIFANIVEEVAYHEQYPTIYHLRKHLADNPEKADLRLVYLALAHIIKFRGHFLIEGKFDVENTDIQETFKEFLEIYDNTFEDSELGEEDIDVEEILTDKISKSRRVEKVLKLFPTEKKNSIFAEFLKLIVGLTPNFKSHFNLEEDAKLQFSKDTYEEDLEELLGQIGDEYAEIFVSAKKVYDSILLSGILTVKDSSTKAPLSASMVERYDKHHQDLTKLKKFIRKKLPDKYKDIFFDQSKNGYAGYIDGGAKQEDFYKYLKKLLNKIEGSDYFLEKIEREDFLRKQRTFDNGSIPHQVHLQELRAIIRNQAKYYPFLKENQDKIESILTFRIPYYVGPLARGNSRFAWLSRKSDETITPWNFDKIIDKEKSAEAFIQRMTNFDKNLPDEKVLPKHSLLYEKFTVYNELTKVKYIDERGEEEQFFDANLKQEIFNGVFKKYRKVTKKQLLDYLLKEFDELRIVDISGVEDRFNASYGTYHDLKKILGGEEFLDDPKNQEMLEEIIKTLTLFEDRKMIKKRLEKYSDILTKEQIKKLSRRRYTGWGRLSAKLLNGIRDKETNKTILDYLIDDDNSNRNFMQLIHDDNLSFKDEIAKAQVIDDSESLHEVIANLAGSPAIKKGILQSLKIVDEIVKVMGRYAPKNIVVEMARENQTTQKGQKNSRERMKRLQEAMKEFGSDLLKEYPTDNTALQNDKLYLYYIQNGKDMYTGEALDIDNLSDYDVDHIVPQSFLKDDSIDNRVLVSSKEARGKSDDVPSIDIVRKMKPFWKKLLEAKLITQRKYDNLTKVERGSLTELDKAGFIKRQLVETRQITKHVAQILDERFNEEVNDDGKLIRDTKIVTLKSKLVSQFRKEFELYKVREINNYHHAHDAYLNAVVAKALIKVYPKLESEFVYGDYPVFDVKKLFKRTDREIGKATQKKFFYSNLMNMFKSDVKLADGKVVEKPIVDVNEETGEIAWDKQKHIATIKKVLSMPQVNIVKKTEVQTGGFSKESILPKRDSDKLIARKKDWDTEKYGGFDSPTVAYSILVIADIKKGKAKKIKTTKKIIGVTIMERSAFEEDEVAFLESKGYQNIQENNLVKIPKYTLFEIENGRKRLLASAGELQKGNELALPQHYITLLYHAKNYEKIKKENSHIAYSLNYVNEHREEFSKLLDQVKEFAQRYTLKDANVEKLKELFEQNEEADLEELAKSFINLLIFTAMGAPAAFKFIGKSIDRKRYTSTKELLNATIIHQSITGLYETRIDLSKLGED

SEQ ID NO: 320 - protein, 1368 aa, synthetic construct
MKKPYSIGLDIGTNSVGWAVVTDDYKVPAKKMKVLGNTDKSHIKKNLLGALLFDSGNTAEDRRLKRTARRRYTRRRNRILYLQEIFSEEMGKVDDSFFHRLEDSFLVTEDKRGERHPIFGNLEEEVKYHENFPTIYHLRKYLADSPEKADLRLVYLALAHIIKFRGHFLIEGELDTRNNDVQRLFQEFLAVYDNTFENSSLQEQNVQVEEILTDKISKSAKKDRVLKLFPNEKSNGRFAEFLKLIVGNQADFKKHFELEEKAPLQFSKDTYEEELEVLLAQIGDEYAELFLSAKKLYDSILLSGILTVTDVSTKAPLSASMIQRYNEHQMDLTQLKQFIRQKLSDKYNEVFSDVSKDGYAGYIDGKTNQEAFYKYLKKLLNKIEGSGYFLDKIEREDFLRKQRTFDNGSIPHQIHLQEMRAIIRRQAEFYPFLAENQDKIEKILTFRIPYYVGPLARGKSDFAWLSRKSADKITPWNFDEIVDKESSAEAFINRMTNYDLYLPNQKVLPKHSLLYEKFTVYNELTKVKYKTEQMGKTAFFDANMKQEIFDGVFKVYRKVTKDKLMDFLEKEFDEFRIVDLTGLDKAFNASLGTYHDLRKILKDKDFLDNSKNEKILEDIVLTLTLFEDREMIRKRLENYSDLLTKEQVKKLERRHYTGWGRLSAKLIHGIRNKESRKTILDYLIDDGNSNRNFMQLINDDALSFKEEIAKAQVIGETDNLNQVVSDIAGSPAIKKGILQSLKIVDELVKIMGGHQPENIVVEMARENQFTNQGRRNSQQRLKGLTDSIKEFGSQILKEHPVENSQLQNDRLFLYYLQNGRDMYTGEELDIDYLSQYDIDHIIPQAFIKDNSIDNRVLTSSKEARGKSDDVPSKDVVRKMKSYWSKLLSAKLITQRKFDNLTKAERGGLTDDDKAGFIKRQLVETRQITKHVARILDERFNTETDENNKKIRQVKIVTLKSNLVSNFRKEFELYKVREINDYHHAHDAYLNAVVGKALLGKYPQLEPEFVYGDYPHFNSYKYVRKSDFEENKATAKKFFYSNIMNFFKKDVKLADGTIVERPQVERNDENGEIIWDKDKHISNVKKVLSYPQVNIVKKVEEQTGGFSKESILPKGNSDKLIPRKTKWDTKKYGGFDSPIVAYSVLVIADIEKGKSKKLKTVKALVGITIMEKMTFEKDPVAFLERKGYQNIQEENIIKLPKYSLFELENGRKRLLASARELQKGNEIVLPNHLVTLLYHAKNIHKVDEKQEDQPKHLDYVDKHKDEFKELLDVVSNFSKKYTLAEGNLEKIKELYAQNNSEDIKELASSFINLLTFTAIGAPATFKFFDKNIDRKRYTSTTEILNATLIHQSITGLYETRIDLSKLGGD

SEQ ID NO: 321 - protein, 1368 aa, synthetic construct
MDKKYSIGLDIGTNSVGWAVITDEYKVPSKKFKVLGNTDRHSIKKNLIGALLFDSGETAEATRLKRTARRRYTRRKNRICYLQEIFSNEMAKVDDSFFHRLEESFLVEEDKKHERHPIFGNIVDEVAYHEKYPTIYHLRKKLVDSTDKADLRLIYLALAHMIKFRGHFLIEGDLNPDNSDVDKLFIQLVQTYNQLFEENPINASGVDAKAILSARLSKSRRLENLIAQLPGEKKNGLFGNLIALSLGLTPNFKSNFDLAEDAKLQLSKDTYDDDLDNLLAQIGDQYADLFLAAKNLSDAILLSDILRVNTEITKAPLSASMIKRYDEHHQDLTLLKALVRQQLPEKYKEIFFDQSKNGYAGYIDGGASQEEFYKFIKPILEKMDGTEELLVKLNREDLLRKQRTFDNGSIPHQIHLGELHAILRRQEDFYPFLKDNREKIEKILTFRIPYYVGPLARGNSRFAWMTRKSEETITPWNFEEVVDKGASAQSFIERMTNFDKNLPNEKVLPKHSLLYEYFTVYNELTKVKYVTEGMRKPAFLSGEQKKAIVDLLFKTNRKVTVKQLKEDYFKKIECFDSVEISGVEDRFNASLGTYHDLLKIIKDKDFLDNEENEDILEDIVLTLTLFEDREMIEERLKTYAHLFDDKVMKQLKRRRYTGWGRLSRKLINGIRDKQSGKTILDFLKSDGFANRNFMQLIHDDSLTFKEDIQKAQVSGQGDSLHEHIANLAGSPAIKKGILQTVKVVDELVKVMGRHKPENIVIEMARENQTTQKGQKNSRERMKRIEEGIKELGSQILKEHPVENTQLQNEKLYLYYLQNGRDMYVDQELDINRLSDYDVDHIVPQSFLKDDSIDNKVLTRSDKARGKSDNVPSEEVVKKMKNYWRQLLNAKLITQRKFDNLTKAERGGLSELDKAGFIKRQLVETRQITKHVAQILDSRMNTKYDENDKLIREVKVITLKSKLVSDFRKDFQFYKVREINNYHHAHDAYLNAVVGTALIKKYPKLESEFVYGDYKVYDVRKMIAKSEQEIGKATAKYFFYSNIMNFFKTEITLANGEIRKRPLIETNGETGEIVWDKGRDFATVRKVLSMPQVNIVKKTEVQTGGFSKESILPKRNSDKLIARKKDWDPKKYGGFDSPTVAYSVLVVAKVEKGKSKKLKSVKELLGITIMERSSFEKNPIDFLEAKGYKEVKKDLIIKLPKYSLFELENGRKRMLASAGELQKGNELALPSKYVNFLYLASHYEKLKGSPEDNEQKQLFVEQHKHYLDEIIEQISEFSKRVILADANLDKVLSAYNKHRDKPIREQAENIIHLFTLTNLGAPAAFKYFDTTIDRKRYTSTKEVLDATLIHQSITGLYETRIDLSQLGGD

SEQ ID NO: 322 - DNA, 122 bp, synthetic construct
  source 1..122: mol_type = other DNA
gccgaagcactgcacgccgtgttttagagctagaaatagcaagttaaaataaggctagtccgttatcaacttgaaaaagtggcaccgagtcggtgcaccctgacgtacggcgtgcagtgctt

SEQ ID NO: 323 - protein, 2133 aa, synthetic construct
MPAAKRVKLDGGDKKYSIGLDIGTNSVGWAVITDEYKVPSKKFKVLGNTDRHSIKKNLIGALLFDSGETAEATRLKRTARRRYTRRKNRICYLQEIFSNEMAKVDDSFFHRLEESFLVEEDKKHERHPIFGNIVDEVAYHEKYPTIYHLRKKLVDSTDKADLRLIYLALAHMIKFRGHFLIEGDLNPDNSDVDKLFIQLVQTYNQLFEENPINASGVDAKAILSARLSKSRRLENLIAQLPGEKKNGLFGNLIALSLGLTPNFKSNFDLAEDAKLQLSKDTYDDDLDNLLAQIGDQYADLFLAAKNLSDAILLSDILRVNTEITKAPLSASMIKRYDEHHQDLTLLKALVRQQLPEKYKEIFFDQSKNGYAGYIDGGASQEEFYKFIKPILEKMDGTEELLVKLNREDLLRKQRTFDNGSIPHQIHLGELHAILRRQEDFYPFLKDNREKIEKILTFRIPYYVGPLARGNSRFAWMTRKSEETITPWNFEEVVDKGASAQSFIERMTNFDKNLPNEKVLPKHSLLYEYFTVYNELTKVKYVTEGMRKPAFLSGEQKKAIVDLLFKTNRKVTVKQLKEDYFKKIECFDSVEISGVEDRFNASLGTYHDLLKIIKDKDFLDNEENEDILEDIVLTLTLFEDREMIEERLKTYAHLFDDKVMKQLKRRRYTGWGRLSRKLINGIRDKQSGKTILDFLKSDGFANRNFMQLIHDDSLTFKEDIQKAQVSGQGDSLHEHIANLAGSPAIKKGILQTVKVVDELVKVMGRHKPENIVIEMARENQTTQKGQKNSRERMKRIEEGIKELGSQILKEHPVENTQLQNEKLYLYYLQNGRDMYVDQELDINRLSDYDVDHIVPQSFLKDDSIDNKVLTRSDKARGKSDNVPSEEVVKKMKNYWRQLLNAKLITQRKFDNLTKAERGGLSELDKAGFIKRQLVETRQITKHVAQILDSRMNTKYDENDKLIREVKVITLKSKLVSDFRKDFQFYKVREINNYHHAHDAYLNAVVGTALIKKYPKLESEFVYGDYKVYDVRKMIAKSEQEIGKATAKYFFYSNIMNFFKTEITLANGEIRKRPLIETNGETGEIVWDKGRDFATVRKVLSMPQVNIVKKTEVQTGGFSKESILPKRNSDKLIARKKDWDPKKYGGFDSPTVAYSVLVVAKVEKGKSKKLKSVKELLGITIMERSSFEKNPIDFLEAKGYKEVKKDLIIKLPKYSLFELENGRKRMLASAGELQKGNELALPSKYVNFLYLASHYEKLKGSPEDNEQKQLFVEQHKHYLDEIIEQISEFSKRVILADANLDKVLSAYNKHRDKPIREQAENIIHLFTLTNLGAPAAFKYFDTTIDRKRYTSTKEVLDATLIHQSITGLYETRIDLSQLGGDGGAEAAAKEAAAKEAAAKEAAAKALEAEAAAKEAAAKEAAAKEAAAKAGGTAPLEEEYRLFLEAPIQNVTLLEQWKREIPKVWAEINPPGLASTQAPIHVQLLSTALPVRVRQYPITLEAKRSLRETIRKFRAAGILRPVHSPWNTPLLPVRKSGTSEYRMVQDLREVNKRVETIHPTVPNPYTLLSLLPPDRIWYSVLDLKDAFFCIPLAPESQLIFAFEWADAEEGESGQLTWTRLPQGFKNSPTLFNEALNRDLQGFRLDHPSVSLLQYVDDLLIAADTQAACLSATRDLLMTLAELGYRVSGKKAQLCQEEVTYLGFKIHKGSRSLSNSRTQAILQIPVPKTKRQVREFLGKIGYCRLFIPGFAELAQPLYAATRPGNDPLVWGEKEEEAFQSLKLALTQPPALALPSLDKPFQLFVEETSGAAKGVLTQALGPWKRPVAYLSKRLDPVAAGWPRCLRAIAAAALLTREASKLTFGQDIEITSSHNLESLLRSPPDKWLTNARITQYQVLLLDPPRVRFKQTAALNPATLLPETDDTLPIHHCLDTLDSLTSTRPDLTDQPLAQAEATLFTDGSSYIRDGKRYAGAAVVTLDSVIWAEPLPIGTSAQKAELIALTKALEWSKDKSVNIYTDSRYAFATLHVHGMIYRERGWLTAGGKAIKNAPEILALLTAVWLPKRVAVMHCKGHQKDDAPTSTGNRRADEVAREVAIRPLSTQATISAGKRTADGSEFEKRTADGSEFESPKKKAKVE

SEQ ID NO: 324 - protein, 672 aa, unidentified
TLNIEDEHRLHETSKEPDVSLGSTWLSDFPQAWAETGGMGLAVRQAPLIIPLKATSTPVSIKQYPMSQEARLGIKPHIQRLLDQGILVPCQSPWNTPLLPVKKPGTNDYRPVQDLREVNKRVEDIHPTVPNPYNLLSGLPPSHQWYTVLDLKDAFFCLRLHPTSQPLFAFEWRDPEMGISGQLTWTRLPQGFKNSPTLFDEALHRDLADFRIQHPDLILLQYVDDLLLAATSELDCQQGTRALLQTLGNLGYRASAKKAQICQKQVKYLGYLLKEGQRWLTEARKETVMGQPTPKTPRQLREFLGTAGFCRLWIPGFAEMAAPLYPLTKTGTLFNWGPDQQKAYQEIKQALLTAPALGLPDLTKPFELFVDEKQGYAKGVLTQKLGPWRRPVAYLSKKLDPVAAGWPPCLRMVAAIAVLTKDAGKLTMGQPLVILAPHAVEALVKQPPDRWLSNARMTHYQALLLDTDRVQFGPVVALNPATLLPLPEEGLQHNCLDILAEAHGTRPDLTDQPLPDADHTWYTDGSSLLQEGQRKAGAAVTTETEVIWAKALPAGTSAQRAELIALTQALKMAEGKKLNVYTDSRYAFATAHIHGEIYRRRGLLTSEGKEIKNKDEILALLKALFLPKRLSIIHCPGHQKGHSAEARGNRMADQAARKAAITETPDTSTLLI

SEQ ID NO: 325 - protein, 859 aa, Rous sarcoma virus
TVALHLAIPLKWKPDHTPVWIDQWPLPEGKLVALTQLVEKELQLGHIEPSLSCWNTPVFVIRKASGSYRLLHDLRAVNAKLVPFGAVQQGAPVLSALPRGWPLMVLDLKDCFFSIPLAEQDREAFAFTLPSVNNQAPARRFQWKVLPQGMTCSPTICQLVVGQVLEPLRLKHPSLCMLHYMDDLLLAASSHDGLEAAGEEVISTLERAGFTISPDKVQREPGVQYLGYKLGSTYVAPVGLVAEPRIATLWDVQKLVGSLQWLRPALGIPPRLMGPFYEQLRGSDPNEAREWNLDMKMAWREIVRLSTTAALERWDPALPLEGAVARCEQGAIGVLGQGLSTHPRPCLWLFSTQPTKAFTAWLEVLTLLITKLRASAVRTFGKEVDILLLPACFREDLPLPEGILLALKGFAGKIRSSDTPSIFDIARPLHVSLKVRVTDHPVPGPTVFTDASSSTHKGVVVWREGPRWEIKEIADLGASVQQLEARAVAMALLLWPTTPTNVVTDSAFVAKMLLKMGQEGVPSTAAAFILEDALSQRSAMAAVLHVRSHSEVPGFFTEGNDVADSQATFQAYPLREAKDLHTALHIGPRALSKACNISMQQAREVVQTCPHCNSAPALEAGVNPRGLGPLQIWQTDFTLEPRMAPRSWLAVTVDTASSAIVVTQHGRVTSVAVQHHWATAIAVLGRPKAIKTDNGSCFTSKSTREWLARWGIAHTTGIPGNSQGQAMVERANRLLKDRIRVLAEGDGFMKRIPTSKQGELLAKAMYALNHFERGENTKTPIQKHWRPTVLTEGPPVKIRIETGEWEKGWNVLVWGRGYAAVKNRDTDKVIWVPSRKVKPDITQKDEVTKKDEASPLFAG

SEQ ID NO: 326 - protein, 572 aa, Alfalfa mosaic virus
TVALHLAIPLKWKPNHTPVWIDQWPLPEGKLVALTQLVEKELQLGHIEPSLSCWNTPVFVIRKASGSYRLLHDLRAVNAKLVPFGAVQQGAPVLSALPRGWPLMVLDLKDCFFSIPLAEQDREAFAFTLPSVNNQAPARRFQWKVLPQGMTCSPTICQLIVGQILEPLRLKHPSLRMLHYMDDLLLAASSHDGLEAAGEEVISTLERAGFTISPDKVQREPGVQYLGYKLGSTYVAPVGLVAEPRIATLWDVQKLVGSLQWLRPALGIPPRLMGPFYEQLRGSDPNEAREWNLDMKMAWREIVQLSTTAALERWDPALPLEGAVARCEQGAIGVLGQGLSTHPRPCLWLFSTQPTKAFTAWLEVLTLLITKLRASAVRTFGKEVDILLLPACFREDLPLPEGILLALRGFAGKIRSSDTPSIFDIARPLHVSLKVRVTDHPVPGPTVFTDASSSTHKGVVVWREGPRWEIKEIADLGASVQQLEARAVAMALLLWPTTPTNVVTDSAFVAKMLLKMGQEGVPSTAAAFILEDALSQRSAMAAVLHVRSHSEVPGFFTEGNDVADSQATFQAY

SEQ ID NO: 327 - protein, 560 aa, unidentified
PISPIETVPVKLKPGMDGPKVKQWPLTEEKIKALVEICTEMEKEGKISKIGPENPYNTPVFAIKKKDSTKWRKLVDFRELNKRTQDFWEVQLGIPHPAGLKKKKSVTVLDVGDAYFSVPLDEDFRKYTAFTIPSINNETPGIRYQYNVLPQGWKGSPAIFQSSMTKILEPFRKQNPDIVIYQYMDDLYVGSDLEIGQHRTKIEELRQHLLRWGLTTPDKKHQKEPPFLWMGYELHPDKWTVQPIVLPEKDSWTVNDIQKLVGKLNWASQIYPGIKVRQLCKLLRGTKALTEVIPLTEEAELELAENREILKEPVHGVYYDPSKDLIAEIQKQGQGQWTYQIYQEPFKNLKTGKYARMRGAHTNDVKQLTEAVQKITTESIVIWGKTPKFKLPIQKETWETWWTEYWQATWIPEWEFVNTPPLVKLWYQLEKEPIVGAETFYVDGAANRETKLGKAGYVTNRGRQKVVTLTDTTNQKTELQAIYLALQDSGLEVNIVTDSQYALGIIQAQPDQSESELVNQIIEQLIKKEKVYLAWVPAHKGIGGNEQVDKLVSAGIRKVL

SEQ ID NO: 328 - protein, 673 aa, Reticuloendotheliosis virus
TAPLEEEYRLFLEAPIQNVTLLEQWKREIPKVWAEINPPGLASTQAPIHVQLLSTALPVRVRQYPITLEAKRSLRETIRKFRAAGILRPVHSPWNTPLLPVRKSGTSEYRMVQDLREVNKRVETIHPTVPNPYTLLSLLPPDRIWYSVLDLKDAFFCIPLAPESQLIFAFEWADAEEGESGQLTWTRLPQGFKNSPTLFDEALNRDLQGFRLDHPSVSLLQYVDDLLIAADTQAACLSATRDLLMTLAELGYRVSGKKAQLCQEEVTYLGFKIHKGSRSLSNSRTQAILQIPVPKTKRQVREFLGTIGYCRLWIPGFAELAQPLYAATRGGNDPLVWGEKEEEAFQSLKLALTQPPALALPSLDKPFQLFVEETSGAAKGVLTQALGPWKRPVAYLSKRLDPVAAGWPRCLRAIAAAALLTREASKLTFGQDIEITSSHNLESLLRSPPDKWLTNARITQYQVLLLDPPRVRFKQTAALNPATLLPETDDTLPIHHCLDTLDSLTSTRPDLTDQPLAQAEATLFTDGSSYIRDGKRYAGAAVVTLDSVIWAEPLPIGTSAQKAELIALTKALEWSKDKSVNIYTDSRYAFATLHVHGMIYRERGLLTAGGKAIKNAPEILALLTAVWLPKRVAVMHCKGHQKDDAPTSTGNRRADEVAREVAIRPLSTQATIS

SEQ ID NO: 329 - protein, 673 aa, synthetic construct
TAPLEEEYRLFLEAPIQNVTLLEQWKREIPKVWAEINPPGLASTQAPIHVQLLSTALPVRVRQYPITLEAKRSLRETIRKFRAAGILRPVHSPWNTPLLPVRKSGTSEYRMVQDLREVNKRVETIHPTVPNPYTLLSLLPPDRIWYSVLDLKDAFFCIPLAPESQLIFAFEWADAEEGESGQLTWTRLPQGFKNSPTLFNEALNRDLQGFRLDHPSVSLLQYVDDLLIAADTQAACLSATRDLLMTLAELGYRVSGKKAQLCQEEVTYLGFKIHKGSRSLSNSRTQAILQIPVPKTKRQVREFLGTIGYCRLWIPGFAELAQPLYAATRPGNDPLVWGEKEEEAFQSLKLALTQPPALALPSLDKPFQLFVEETSGAAKGVLTQALGPWKRPVAYLSKRLDPVAAGWPRCLRAIAAAALLTREASKLTFGQDIEITSSHNLESLLRSPPDKWLTNARITQYQVLLLDPPRVRFKQTAALNPATLLPETDDTLPIHHCLDTLDSLTSTRPDLTDQPLAQAEATLFTDGSSYIRDGKRYAGAAVVTLDSVIWAEPLPIGTSAQKAELIALTKALEWSKDKSVNIYTDSRYAFATLHVHGMIYRERGWLTAGGKAIKNAPEILALLTAVWLPKRVAVMHCKGHQKDDAPTSTGNRRADEVAREVAIRPLSTQATIS

SEQ ID NO: 330 - protein, 673 aa, synthetic construct
TAPLEEEYRLFLEAPIQNVTLLEQWKREIPKVWAEINPPGLASTQAPIHVQLLSTALPVRVRQYPITLEAKRSLRETIRKFRAAGILRPVHSPWNTPLLPVRKSGTSEYRMVQDLREVNKRVETIHPTVPNPYTLLSLLPPDRIWYSVLDLKDAFFCIPLAPESQLIFAFEWADAEEGESGQLTWTRLPQGFKNSPTLFNEALNRDLQGFRLDHPSVSLLQYVDDLLIAADTQAACLSATRDLLMTLAELGYRVSGKKAQLCQEEVTYLGFKIHKGSRSLSNSRTQAILQIPVPKTKRQVREFLGKIGYCRLFIPGFAELAQPLYAATRPGNDPLVWGEKEEEAFQSLKLALTQPPALALPSLDKPFQLFVEETSGAAKGVLTQALGPWKRPVAYLSKRLDPVAAGWPRCLRAIAAAALLTREASKLTFGQDIEITSSHNLESLLRSPPDKWLTNARITQYQVLLLDPPRVRFKQTAALNPATLLPETDDTLPIHHCLDTLDSLTSTRPDLTDQPLAQAEATLFTDGSSYIRDGKRYAGAAVVTLDSVIWAEPLPIGTSAQKAELIALTKALEWSKDKSVNIYTDSRYAFATLHVHGMIYRERGWLTAGGKAIKNAPEILALLTAVWLPKRVAVMHCKGHQKDDAPTSTGNRRADEVAREVAIRPLSTQATIS

SEQ ID NO: 331 - protein, 677 aa, unidentified
TVSLQDEHRLFDIPVTTSLPDVWLQDFPQAWAETGGLGRAKCQAPIIIDLKPTAVPVSIKQYPMSLEAHMGIRQHIIKFLELGVLRPCRSPWNTPLLPVKKPGTQDYRPVQDLREINKRTVDIHPTVPNPYNLLSTLKPDYSWYTVLDLKDAFFCLPLAPQSQELFAFEWKDPERGISGQLTWTRLPQGFKNSPTLFDEALHRDLTDFRTQHPEVTLLQYVDDLLLAAPTKKACTQGTRHLLQELGEKGYRASAKKAQICQTKVTYLGYILSEGKRWLTPGRIETVARIPPPRNPREVREFLGTAGFCRLWIPGFAELAAPLYALTKESTPFTWQTEHQLAFEALKKALLSAPALGLPDTSKPFTLFLDERQGIAKGVLTQKLGPWKRPVAYLSKKLDPVAAGWPPCLRIMAATAMLVKDSAKLTLGQPLTVITPHTLEAIVRQPPDRWITNARLTHYQALLLDTDRVQFGPPVTLNPATLLPVPENQPSPHDCRQVLAETHGTREDLKDQELPDADHTWYTDGSSYLDSGTRRAGAAVVDGHNTIWAQSLPPGTSAQKAELIALTKALELSKGKKANIYTDSRYAFATAHTHGSIYERRGLLTSEGKEIKNKAEIIALLKALFLPQEVAIIHCPGHQKGQDPVAVGNRQADRVARQAAMAEVLTLATEPDNTSHIT

SEQ ID NO: 332 - protein, 677 aa, synthetic construct
TVSLQDEHRLFDIPVTTSLPDVWLQDFPQAWAETGGLGRAKCQAPIIIDLKPTAVPVSIKQYPMSLEAHMGIRQHIIKFLELGVLRPCRSPWNTPLLPVKKPGTQDYRPVQDLREINKRTVDIHPTVPNPYNLLSTLKPDYSWYTVLDLKDAFFCLPLAPQSQELFAFEWKDPERGISGQLTWTRLPQGFKNSPTLFNEALHRDLTDFRTQHPEVTLLQYVDDLLLAAPTKKACTQGTRHLLQELGEKGYRASAKKAQICQTKVTYLGYILSEGKRWLTPGRIETVARIPPPRNPREVREFLGTAGFCRLWIPGFAELAAPLYALTKPSTPFTWQTEHQLAFEALKKALLSAPALGLPDTSKPFTLFLDERQGIAKGVLTQKLGPWKRPVAYLSKKLDPVAAGWPPCLRIMAATAMLVKDSAKLTLGQPLTVITPHTLEAIVRQPPDRWITNARLTHYQALLLDTDRVQFGPPVTLNPATLLPVPENQPSPHDCRQVLAETHGTREDLKDQELPDADHTWYTDGSSYLDSGTRRAGAAVVDGHNTIWAQSLPPGTSAQKAELIALTKALELSKGKKANIYTDSRYAFATAHTHGSIYERRGWLTSEGKEIKNKAEIIALLKALFLPQEVAIIHCPGHQKGQDPVAVGNRQADRVARQAAMAEVLTLATEPDNTSHIT

SEQ ID NO: 333 - protein, 677 aa, synthetic construct
TVSLQDEHRLFDIPVTTSLPDVWLQDFPQAWAETGGLGRAKCQAPIIIDLKPTAVPVSIKQYPMSLEAHMGIRQHIIKFLELGVLRPCRSPWNTPLLPVKKPGTQDYRPVQDLREINKRTVDIHPTVPNPYNLLSTLKPDYSWYTVLDLKDAFFCLPLAPQSQELFAFEWKDPERGISGQLTWTRLPQGFKNSPTLFNEALHRDLTDFRTQHPEVTLLQYVDDLLLAAPTKKACTQGTRHLLQELGEKGYRASAKKAQICQTKVTYLGYILSEGKRWLTPGRIETVARIPPPRNPREVREFLGKAGFCRLFIPGFAELAAPLYALTKPSTPFTWQTEHQLAFEALKKALLSAPALGLPDTSKPFTLFLDERQGIAKGVLTQKLGPWKRPVAYLSKKLDPVAAGWPPCLRIMAATAMLVKDSAKLTLGQPLTVITPHTLEAIVRQPPDRWITNARLTHYQALLLDTDRVQFGPPVTLNPATLLPVPENQPSPHDCRQVLAETHGTREDLKDQELPDADHTWYTDGSSYLDSGTRRAGAAVVDGHNTIWAQSLPPGTSAQKAELIALTKALELSKGKKANIYTDSRYAFATAHTHGSIYERRGWLTSEGKEIKNKAEIIALLKALFLPQEVAIIHCPGHQKGQDPVAVGNRQADRVARQAAMAEVLTLATEPDNTSHIT

SEQ ID NO: 334 - protein, 576 aa, Bovine leukemia virus
GVLDAPPSHIGLEHLPPPPEVPQFPLNLERLQALQDLVHRSLEAGYISPWDGPGNNPVFPVRKPNGAWRFVHDLRVTNALTKPIPALSPGPPDLTAIPTHLPHIICLDLKDAFFQIPVEDRFRSYFAFTLPTPGGLQPHRRFAWRVLPQGFINSPALFERALQEPLRQVSAAFSQSLLVSYMDDILYVSPTEEQRLQCYQTMAAHLRDLGFQVASEKTRQTPSPVPFLGQMVHERMVTYQSLPTLQISSPISLHQLQTVLGDLQWVSRGTPTTRRPLQLLYSSLKGIDDPRAIIHLSPEQQQGIAELRQALSHNARSRYNEQEPLLAYVHLTRAGSTLVLFQKGAQFPLAYFQTPLTDNQASPWGLLLLLGCQYLQAQALSSYAKTILKYYHNLPKTSLDNWIQSSEDPRVQELLQLWPQISSQGIQPPGPWKTLVTRAEVFLTPQFSPEPIPAALCLFSDGAARRGAYCLWKDHLLDFQAVPAPESAQKGELAGLLAGLAAAPPEPLNIWVDSKYLYSLLRTLVLGAWLQPDPVPSYALLYKSLLRHPAIFVGHVRSHSSASHPIASLNNYVDQL

SEQ ID NO: 335 - protein, 576 aa, synthetic construct
GVLDAPPSHIGLEHLPPPPEVPQFPLNLERLQALQDLVHRSLEAGYISPWDGPGNNPVFPVRKPNGAWRFVHDLRVTNALTKPIPALSPGPPDLTAIPTHLPHIICLDLKDAFFQIPVEDRFRSYFAFTLPTPGGLQPHRRFAWRVLPQGFINSPALFQRALQEPLRQVSAAFSQSLLVSYMDDILYVSPTEEQRLQCYQTMAAHLRDLGFQVASEKTRQTPSPVPFLGQMVHERMVTYQSLPTLQISSPISLHQLQTVLGDLQWVSRGTPTTRRPLQLLYSSLKPIDDPRAIIHLSPEQQQGIAELRQALSHNARSRYNEQEPLLAYVHLTRAGSTLVLFQKGAQFPLAYFQTPLTDNQASPWGLLLLLGCQYLQAQALSSYAKTILKYYHNLPKTSLDNWIQSSEDPRVQELLQLWPQISSQGIQPPGPWKTLVTRAEVFLTPQFSPEPIPAALCLFSDGAARRGAYCLWKDHLLDFQAVPAPESAQKGELAGLLAGLAAAPPEPLNIWVDSKYLYSLLRTLVLGAWLQPDPVPSYALLYKSLLRHPAIFVGHVRSHSSASHPIASLNNYVDQL

SEQ ID NO: 336 - protein, 576 aa, Bovine leukemia virus
GVLDTPPSHIGLEHLPPPPEVPQFPLNLERLQALQDLVHRSLEAGYISPWDGPGNNPVFPVRKPNGAWRFVHDLRATNALTKPIPALSPGPPDLTAIPTHPPHIICLDLKDAFFQIPVEDRFRFYLSFTLPSPGGLQPHRRFAWRVLPQGFINSPALFERALQEPLRQVSAAFSQSLLVSYMDDILYASPTEEQRSQCYQALAARLRDLGFQVASEKTSQTPSPVPFLGQMVHEQIVTYQSLPTLQISSPISLHQLQAVLGDLQWVSRGTPTTRRPLQLLYSSLKRHHDPRAIIQLSPEQLQGIAELRQALSHNARSRYNEQEPLLAYVHLTRAGSTLVLFQKGAQFPLAYFQTPLTDNQASPWGLLLLLGCQYLQTQALSSYAKPILKYYHNLPKTSLDNWIQSSEDPRVQELLQLWPQISSQGIQPPGPWKTLITRAEVFLTPQFSPDPIPAALCLFSDGATGRGAYCLWKDHLLDFQAVPAPESAQKGELAGLLAGLAAAPPEPVNIWVDSKYLYSLLRTLVLGAWLQPDPVPSYALLYKSLLRHPAIVVGHVRSHSSASHPIASLNNYVDQL

SEQ ID NO: 337 - protein, 576 aa, synthetic construct
GVLDTPPSHIGLEHLPPPPEVPQFPLNLERLQALQDLVHRSLEAGYISPWDGPGNNPVFPVRKPNGAWRFVHDLRATNALTKPIPALSPGPPDLTAIPTHPPHIICLDLKDAFFQIPVEDRFRFYLSFTLPSPGGLQPHRRFAWRVLPQGFINSPALFNRALQEPLRQVSAAFSQSLLVSYMDDILYASPTEEQRSQCYQALAARLRDLGFQVASEKTSQTPSPVPFLGQMVHEQIVTYQSLPTLQISSPISLHQLQAVLGDLQWVSRGTPTTRRPLQLLYSSLKRHHDPRAIIQLSPEQLQGIAELRQALSHNARSRYNEQEPLLAYVHLTRAGSTLVLFQKGAQFPLAYFQTPLTDNQASPWGLLLLLGCQYLQTQALSSYAKPILKYYHNLPKTSLDNWIQSSEDPRVQELLQLWPQISSQGIQPPGPWKTLITRAEVFLTPQFSPDPIPAALCLFSDGATGRGAYCLWKDHLLDFQAVPAPESAQKGELAGLLAGLAAAPPEPVNIWVDSKYLYSLLRTWVLGAWLQPDPVPSYALLYKSLLRHPAIVVGHVRSHSSASHPIASLNNYVDQL

SEQ ID NO: 338 - protein, 576 aa, synthetic construct
GVLDTPPSHIGLEHLPPPPEVPQFPLNLERLQALQDLVHRSLEAGYISPWDGPGNNPVFPVRKPNGAWRFVHDLRATNALTKPIPALSPGPPDLTAPPTHPPHIICLDLKDAFFQIPVEDRFRFYLSFTLPSPGGLQPHRRFAWRVLPQGFINSPALFQRALQEPLRQVSAAFSQSLLVSYMDDILYASPTEEQRSQCYQALAARLRDLGFQVASEKTSQTPSPVPFLGQMVHEQIVTYQSLPTLQISSPISLHQLQAVLGDLQWVSRGTPTTRRPLQLLYSSLKRHHDPRAIIQLSPEQLQGIAELRQALSHNARSRYNEQEPLLAYVHLTRAGSTLVLFQKGAQFPLAYFQTPLTDNQASPWGLLLLLGCQYLQTQALSSYAKPILKYYHNLPKTSLDNWIQSSEDPRVQELLQLWPQISSQGIQPPGPWKTLITRAEVFLTPQFSPDPIPAALCLFSDGATGRGAYCLWKDHLLDFQAVPAPESAQKGELAGLLAGLAAAPPEPVNIWVDSKYLYSLLRTWVLGAWLQPDPVPSYALLYKSLLRHPAIVVGHVRSHSSASHPIASLNNYVDQL

SEQ ID NO: 339 - protein, 748 aa, Feline foamy virus
MDLLKPLTVERKGVKIKGYWNSQADITCVPKDLLQGEEPVRQQNVTTIHGTQEGDVYYVNLKIDGRRINTEVIGTTLDYAIITPGDVPWILKKPLELTIKLDLEEQQGTLLNNSILSKKGKEELKQLFEKYSALWQSWENQVGHRRIRPHKIATGTVKPTPQKQYHINPKAKPDIQIVINDLLKQGVLIQKESTMNTPVYPVPKPNGRWRMVLDYRAVNKVTPLIAVQNQHSYGILGSLFKGRYKTTIDLSNGFWAHPIVPEDYWITAFTWQGKQYCWTVLPQGFLNSPGLFTGDVVDLLQGIPNVEVYVDDVYISHDSEKEHLEYLDILFNRLKEAGYIISLKKSNIANSIVDFLGFQITNEGRGLTDTFKEKLENITAPTTLKQLQSILGLLNFARNFIPDFTELIAPLYALIPKSTKNYVPWQIEHSTTLETLITKLNGAEYLQGRKGDKTLIMKVNASYTTGYIRYYNEGEKKPISYVSIVFSKTELKFTELEKLLTTVHKGLLKALDLSMGQNIHVYSPIVSMQNIQKTPQTAKKALASRWLSWLSYLEDPRIRFFYDPQMPALKDLPAVDTGKDNKKHPSNFQHIFYTDGSAITSPTKEGHLNAGMGIVYFINKDGNLQKQQEWSISLGNHTAQFAEIAAFEFALKKCLPLGGNILVVTDSNYVAKAYNEELDVWASNGFVNNRKKPLKHISKWKSVADLKRLRPDVVVTHEPGHQKLDSSPHAYGNNLADQLATQASFKVH

SEQ ID NO: 340 - protein, 748 aa, synthetic construct
MDLLKPLTVERKGVKIKGYWNSQADITCVPKDLLQGEEPVRQQNVTTIHGTQEGDVYYVNLKIDGRRINTEVIGTTLDYAIITPGDVPWILKKPLELTIKLDLEEQQGTLLNNSILSKKGKEELKQLFEKYSALWQSWENQVGHRRIRPHKIATGTVKPTPQKQYHINPKAKPDIQIVINDLLKQGVLIQKESTMNTPVYPVPKPNGRWRMVLDYRAVNKVTPLIAVQNQHSYGILGSLFKGRYKTTIDLSNGFWAHPIVPEDYWITAFTWQGKQYCWTVLPQGFLNSPGLFNGDVVDLLQGIPNVEVYVDDVYISHDSEKEHLEYLDILFNRLKEAGYIISLKKSNIANSIVDFLGFQITNEGRGLTDTFKEKLENITAPTTLKQLQSILGLLNFARNFIPDFTELIAPLYALIPKSPKNYVPWQIEHSTTLETLITKLNGAEYLQGRKGDKTLIMKVNASYTTGYIRYYNEGEKKPISYVSIVFSKTELKFTELEKLLTTVHKGLLKALDLSMGQNIHVYSPIVSMQNIQKTPQTAKKALASRWLSWLSYLEDPRIRFFYDPQMPALKDLPAVDTGKDNKKHPSNFQHIFYTDGSAITSPTKEGHLNAGMGIVYFINKDGNLQKQQEWSISLGNHTAQFAEIAAFEFALKKCLPLGGNILVVTDSNYVAKAYNEELDVWASNGFVNNRKKPLKHISKWKSVADLKRLRPDVVVTHEPGHQKLDSSPHAYGNNLADQLATQASFKVH

SEQ ID NO: 341 - protein, 748 aa, synthetic construct
MDLLKPLTVERKGVKIKGYWNSQADITCVPKDLLQGEEPVRQQNVTTIHGTQEGDVYYVNLKIDGRRINTEVIGTTLDYAIITPGDVPWILKKPLELTIKLDLEEQQGTLLNNSILSKKGKEELKQLFEKYSALWQSWENQVGHRRIRPHKIATGTVKPTPQKQYHINPKAKPDIQIVINDLLKQGVLIQKESTMNTPVYPVPKPNGRWRMVLDYRAVNKVTPLIAVQNQHSYGILGSLFKGRYKTTIDLSNGFWAHPIVPEDYWITAFTWQGKQYCWTVLPQGFLNSPGLFNGDVVDLLQGIPNVEVYVDDVYISHDSEKEHLEYLDILFNRLKEAGYIISLKKSNIANSIVDFLGFQITNEGRGLTDTFKEKLENITAPTTLKQLQSILGKLNFARNFIPDFTELIAPLYALIPKSPKNYVPWQIEHSTTLETLITKLNGAEYLQGRKGDKTLIMKVNASYTTGYIRYYNEGEKKPISYVSIVFSKTELKFTELEKLLTTVHKGLLKALDLSMGQNIHVYSPIVSMQNIQKTPQTAKKALASRWLSWLSYLEDPRIRFFYDPQMPALKDLPAVDTGKDNKKHPSNFQHIFYTDGSAITSPTKEGHLNAGMGIVYFINKDGNLQKQQEWSISLGNHTAQFAEIAAFEFALKKCLPLGGNILVVTDSNYVAKAYNEELDVWASNGFVNNRKKPLKHISKWKSVADLKRLRPDVVVTHEPGHQKLDSSPHAYGNNLADQLATQASFKVH

SEQ ID NO: 342 - protein, 662 aa, synthetic construct
VPWILKKPLELTIKLDLEEQQGTLLNNSILSKKGKEELKQLFEKYSALWQSWENQVGHRRIRPHKIATGTVKPTPQKQYHINPKAKPDIQIVINDLLKQGVLIQKESTMNTPVYPVPKPNGRWRMVLDYRAVNKVTPLIAVQNQHSYGILGSLFKGRYKTTIDLSNGFWAHPIVPEDYWITAFTWQGKQYCWTVLPQGFLNSPGLFTGDVVDLLQGIPNVEVYVDDVYISHDSEKEHLEYLDILFNRLKEAGYIISLKKSNIANSIVDFLGFQITNEGRGLTDTFKEKLENITAPTTLKQLQSILGLLNFARNFIPDFTELIAPLYALIPKSTKNYVPWQIEHSTTLETLITKLNGAEYLQGRKGDKTLIMKVNASYTTGYIRYYNEGEKKPISYVSIVFSKTELKFTELEKLLTTVHKGLLKALDLSMGQNIHVYSPIVSMQNIQKTPQTAKKALASRWLSWLSYLEDPRIRFFYDPQMPALKDLPAVDTGKDNKKHPSNFQHIFYTDGSAITSPTKEGHLNAGMGIVYFINKDGNLQKQQEWSISLGNHTAQFAEIAAFEFALKKCLPLGGNILVVTDSNYVAKAYNEELDVWASNGFVNNRKKPLKHISKWKSVADLKRLRPDVVVTHEPGHQKLDSSPHAYGNNLADQLATQASFKVH

SEQ ID NO: 343 - protein, 662 aa, synthetic construct
VPWILKKPLELTIKLDLEEQQGTLLNNSILSKKGKEELKQLFEKYSALWQSWENQVGHRRIRPHKIATGTVKPTPQKQYHINPKAKPDIQIVINDLLKQGVLIQKESTMNTPVYPVPKPNGRWRMVLDYRAVNKVTPLIAVQNQHSYGILGSLFKGRYKTTIDLSNGFWAHPIVPEDYWITAFTWQGKQYCWTVLPQGFLNSPGLFNGDVVDLLQGIPNVEVYVDDVYISHDSEKEHLEYLDILFNRLKEAGYIISLKKSNIANSIVDFLGFQITNEGRGLTDTFKEKLENITAPTTLKQLQSILGLLNFARNFIPDFTELIAPLYALIPKSPKNYVPWQIEHSTTLETLITKLNGAEYLQGRKGDKTLIMKVNASYTTGYIRYYNEGEKKPISYVSIVFSKTELKFTELEKLLTTVHKGLLKALDLSMGQNIHVYSPIVSMQNIQKTPQTAKKALASRWLSWLSYLEDPRIRFFYDPQMPALKDLPAVDTGKDNKKHPSNFQHIFYTDGSAITSPTKEGHLNAGMGIVYFINKDGNLQKQQEWSISLGNHTAQFAEIAAFEFALKKCLPLGGNILVVTDSNYVAKAYNEELDVWASNGFVNNRKKPLKHISKWKSVADLKRLRPDVVVTHEPGHQKLDSSPHAYGNNLADQLATQASFKVH

SEQ ID NO: 344 - protein, 662 aa, synthetic construct
VPWILKKPLELTIKLDLEEQQGTLLNNSILSKKGKEELKQLFEKYSALWQSWENQVGHRRIRPHKIATGTVKPTPQKQYHINPKAKPDIQIVINDLLKQGVLIQKESTMNTPVYPVPKPNGRWRMVLDYRAVNKVTPLIAVQNQHSYGILGSLFKGRYKTTIDLSNGFWAHPIVPEDYWITAFTWQGKQYCWTVLPQGFLNSPGLFNGDVVDLLQGIPNVEVYVDDVYISHDSEKEHLEYLDILFNRLKEAGYIISLKKSNIANSIVDFLGFQITNEGRGLTDTFKEKLENITAPTTLKQLQSILGKLNFARNFIPDFTELIAPLYALIPKSPKNYVPWQIEHSTTLETLITKLNGAEYLQGRKGDKTLIMKVNASYTTGYIRYYNEGEKKPISYVSIVFSKTELKFTELEKLLTTVHKGLLKALDLSMGQNIHVYSPIVSMQNIQKTPQTAKKALASRWLSWLSYLEDPRIRFFYDPQMPALKDLPAVDTGKDNKKHPSNFQHIFYTDGSAITSPTKEGHLNAGMGIVYFINKDGNLQKQQEWSISLGNHTAQFAEIAAFEFALKKCLPLGGNILVVTDSNYVAKAYNEELDVWASNGFVNNRKKPLKHISKWKSVADLKRLRPDVVVTHEPGHQKLDSSPHAYGNNLADQLATQASFKVH

SEQ ID NO: 345 - protein, 670 aa, Feline leukemia virus
TLQLEEEYRLFEPESTQKQEMDIWLKNFPQAWAETGGMGTAHCQAPVLIQLKATATPISIRQYPMPHEAYQGIKPHIRRMLDQGILKPCQSPWNTPLLPVKKPGTEDYRPVQDLREVNKRVEDIHPTVPNPYNLLSTLPPSHPWYTVLDLKDAFFCLRLHSESQLLFAFEWRDPEIGLSGQLTWTRLPQGFKNSPTLFDEALHSDLADFRVRYPALVLLQYVDDLLLAAATRTECLEGTKALLETLGNKGYRASAKKAQICLQEVTYLGYSLKDGQRWLTKARKEAILSIPVPKNSRQVREFLGTAGYCRLWIPGFAELAAPLYPLTRPGTLFQWGTEQQLAFEDIKKALLSSPALGLPDITKPFELFIDENSGFAKGVLVQKLGPWKRPVAYLSKKLDTVASGWPPCLRMVAAIAILVKDAGKLTLGQPLTILTSHPVEALVRQPPNKWLSNARMTHYQAMLLDAERVHFGPTVSLNPATLLPLPSGGNHHDCLQILAETHGTRPDLTDQPLPDADLTWYTDGSSFIRNGEREAGAAVTTESEVIWAAPLPPGTSAQRAELIALTQALKMAEGKKLTVYTDSRYAFATTHVHGEIYRRRGLLTSEGKEIKNKNEILALLEALFLPKRLSIIHCPGHQKGDSPQAKGNRLADDTAKKAATETHSSLTVLP

SEQ ID NO: 346 - protein, 670 aa, synthetic construct
TLQLEEEYRLFEPESTQKQEMDIWLKNFPQAWAETGGMGTAHCQAPVLIQLKATATPISIRQYPMPHEAYQGIKPHIRRMLDQGILKPCQSPWNTPLLPVKKPGTEDYRPVQDLREVNKRVEDIHPTVPNPYNLLSTLPPSHPWYTVLDLKDAFFCLRLHSESQLLFAFEWRDPEIGLSGQLTWTRLPQGFKNSPTLFNEALHSDLADFRVRYPALVLLQYVDDLLLAAATRTECLEGTKALLETLGNKGYRASAKKAQICLQEVTYLGYSLKDGQRWLTKARKEAILSIPVPKNSRQVREFLGTAGYCRLWIPGFAELAAPLYPLTRPGTLFQWGTEQQLAFEDIKKALLSSPALGLPDITKPFELFIDENSGFAKGVLVQKLGPWKRPVAYLSKKLDTVASGWPPCLRMVAAIAILVKDAGKLTLGQPLTILTSHPVEALVRQPPNKWLSNARMTHYQAMLLDAERVHFGPTVSLNPATLLPLPSGGNHHDCLQILAETHGTRPDLTDQPLPDADLTWYTDGSSFIRNGEREAGAAVTTESEVIWAAPLPPGTSAQRAELIALTQALKMAEGKKLTVYTDSRYAFATTHVHGEIYRRRGWLTSEGKEIKNKNEILALLEALFLPKRLSIIHCPGHQKGDSPQAKGNRLADDTAKKAATETHSSLTVLP

SEQ ID NO: 347 - protein, 670 aa, synthetic construct
TLQLEEEYRLFEPESTQKQEMDIWLKNFPQAWAETGGMGTAHCQAPVLIQLKATATPISIRQYPMPHEAYQGIKPHIRRMLDQGILKPCQSPWNTPLLPVKKPGTEDYRPVQDLREVNKRVEDIHPTVPNPYNLLSTLPPSHPWYTVLDLKDAFFCLRLHSESQLLFAFEWRDPEIGLSGQLTWTRLPQGFKNSPTLFNEALHSDLADFRVRYPALVLLQYVDDLLLAAATRTECLEGTKALLETLGNKGYRASAKKAQICLQEVTYLGYSLKDGQRWLTKARKEAILSIPVPKNSRQVREFLGKAGYCRLFIPGFAELAAPLYPLTRPGTLFQWGTEQQLAFEDIKKALLSSPALGLPDITKPFELFIDENSGFAKGVLVQKLGPWKRPVAYLSKKLDTVASGWPPCLRMVAAIAILVKDAGKLTLGQPLTILTSHPVEALVRQPPNKWLSNARMTHYQAMLLDAERVHFGPTVSLNPATLLPLPSGGNHHDCLQILAETHGTRPDLTDQPLPDADLTWYTDGSSFIRNGEREAGAAVTTESEVIWAAPLPPGTSAQRAELIALTQALKMAEGKKLTVYTDSRYAFATTHVHGEIYRRRGWLTSEGKEIKNKNEILALLEALFLPKRLSIIHCPGHQKGDSPQAKGNRLADDTAKKAATETHSSLTVLP

SEQ ID NO: 348 - protein, 751 aa, unidentified
MNPLQLLQPLPAEIKGTKLLAHWNSGATITCIPESFLEDEQPIKKTLIKTIHGEKQQNVYYVTFKVKGRKVEAEVIASPYEYILLSPTDVPWLTQQPLQLTILVPLQEYQEKILSKTALPEDQKQQLKTLFVKYDNLWQHWENQVGHRKIRPHNIATGDYPPRPQKQYPINPKAKPSIQIVIDDLLKQGVLTPQNSTMNTPVYPVPKPDGRWRMVLDYREVNKTIPLTAAQNQHSAGILATIVRQKYKTTLDLANGFWAHPITPESYWLTAFTWQGKQYCWTRLPQGFLNSPALFTADVVDLLKEIPNVQVYVDDIYLSHDDPKEHVQQLEKVFQILLQAGYVVSLKKSEIGQKTVEFLGFNITKEGRGLTDTFKTKLLNITPPKDLKQLQSILGLLNFARNFIPNFAELVQPLYNLIASAKGKYIEWSEENTKQLNMVIEALNTASNLEERLPEQRLVIKVNTSPSAGYVRYYNETGKKPIMYLNYVFSKAELKFSMLEKLLTTMHKALIKAMDLAMGQEILVYSPIVSMTKIQKTPLPERKALPIRWITWMTYLEDPRIQFHYDKTLPELKHIPDVYTSSQSPVKHPSQYEGVFYTDGSAIKSPDPTKSNNAGMGIVHATYKPEYQVLNQWSIPLGNHTAQMAEIAAVEFACKKALKIPGPVLVITDSFYVAESANKELPYWKSNGFVNNKKKPLKHISKWKSIAECLSMKPDITIQHEKGISLQIPVFILKGNALADKLATQGSYVVN

SEQ ID NO: 349 - protein, 751 aa, synthetic construct
MNPLQLLQPLPAEIKGTKLLAHWNSGATITCIPESFLEDEQPIKKTLIKTIHGEKQQNVYYVTFKVKGRKVEAEVIASPYEYILLSPTDVPWLTQQPLQLTILVPLQEYQEKILSKTALPEDQKQQLKTLFVKYDNLWQHWENQVGHRKIRPHNIATGDYPPRPQKQYPINPKAKPSIQIVIDDLLKQGVLTPQNSTMNTPVYPVPKPDGRWRMVLDYREVNKTIPLTAAQNQHSAGILATIVRQKYKTTLDLANGFWAHPITPESYWLTAFTWQGKQYCWTRLPQGFLNSPALFNADVVDLLKEIPNVQVYVDDIYLSHDDPKEHVQQLEKVFQILLQAGYVVSLKKSEIGQKTVEFLGFNITKEGRGLTDTFKTKLLNITPPKDLKQLQSILGLLNFARNFIPNFAELVQPLYNLIAPAKGKYIEWSEENTKQLNMVIEALNTASNLEERLPEQRLVIKVNTSPSAGYVRYYNETGKKPIMYLNYVFSKAELKFSMLEKLLTTMHKALIKAMDLAMGQEILVYSPIVSMTKIQKTPLPERKALPIRWITWMTYLEDPRIQFHYDKTLPELKHIPDVYTSSQSPVKHPSQYEGVFYTDGSAIKSPDPTKSNNAGMGIVHATYKPEYQVLNQWSIPLGNHTAQMAEIAAVEFACKKALKIPGPVLVITDSFYVAESANKELPYWKSNGFVNNKKKPLKHISKWKSIAECLSMKPDITIQHEKGISLQIPVFILKGNALADKLATQGSYVVN

SEQ ID NO: 350 - protein, 751 aa, synthetic construct
MNPLQLLQPLPAEIKGTKLLAHWNSGATITCIPESFLEDEQPIKKTLIKTIHGEKQQNVYYVTFKVKGRKVEAEVIASPYEYILLSPTDVPWLTQQPLQLTILVPLQEYQEKILSKTALPEDQKQQLKTLFVKYDNLWQHWENQVGHRKIRPHNIATGDYPPRPQKQYPINPKAKPSIQIVIDDLLKQGVLTPQNSTMNTPVYPVPKPDGRWRMVLDYREVNKTIPLTAAQNQHSAGILATIVRQKYKTTLDLANGFWAHPITPESYWLTAFTWQGKQYCWTRLPQGFLNSPALFNADVVDLLKEIPNVQVYVDDIYLSHDDPKEHVQQLEKVFQILLQAGYVVSLKKSEIGQKTVEFLGFNITKEGRGLTDTFKTKLLNITPPKDLKQLQSILGKLNFARNFIPNFAELVQPLYNLIAPAKGKYIEWSEENTKQLNMVIEALNTASNLEERLPEQRLVIKVNTSPSAGYVRYYNETGKKPIMYLNYVFSKAELKFSMLEKLLTTMHKALIKAMDLAMGQEILVYSPIVSMTKIQKTPLPERKALPIRWITWMTYLEDPRIQFHYDKTLPELKHIPDVYTSSQSPVKHPSQYEGVFYTDGSAIKSPDPTKSNNAGMGIVHATYKPEYQVLNQWSIPLGNHTAQMAEIAAVEFACKKALKIPGPVLVITDSFYVAESANKELPYWKSNGFVNNKKKPLKHISKWKSIAECLSMKPDITIQHEKGISLQIPVFILKGNALADKLATQGSYVVN

SEQ ID NO: 351 - protein, 662 aa, synthetic construct
VPWLTQQPLQLTILVPLQEYQEKILSKTALPEDQKQQLKTLFVKYDNLWQHWENQVGHRKIRPHNIATGDYPPRPQKQYPINPKAKPSIQIVIDDLLKQGVLTPQNSTMNTPVYPVPKPDGRWRMVLDYREVNKTIPLTAAQNQHSAGILATIVRQKYKTTLDLANGFWAHPITPESYWLTAFTWQGKQYCWTRLPQGFLNSPALFTADVVDLLKEIPNVQVYVDDIYLSHDDPKEHVQQLEKVFQILLQAGYVVSLKKSEIGQKTVEFLGFNITKEGRGLTDTFKTKLLNITPPKDLKQLQSILGLLNFARNFIPNFAELVQPLYNLIASAKGKYIEWSEENTKQLNMVIEALNTASNLEERLPEQRLVIKVNTSPSAGYVRYYNETGKKPIMYLNYVFSKAELKFSMLEKLLTTMHKALIKAMDLAMGQEILVYSPIVSMTKIQKTPLPERKALPIRWITWMTYLEDPRIQFHYDKTLPELKHIPDVYTSSQSPVKHPSQYEGVFYTDGSAIKSPDPTKSNNAGMGIVHATYKPEYQVLNQWSIPLGNHTAQMAEIAAVEFACKKALKIPGPVLVITDSFYVAESANKELPYWKSNGFVNNKKKPLKHISKWKSIAECLSMKPDITIQHEKGISLQIPVFILKGNALADKLATQGSYVVN

SEQ ID NO: 352 - protein, 662 aa, synthetic construct
VPWLTQQPLQLTILVPLQEYQEKILSKTALPEDQKQQLKTLFVKYDNLWQHWENQVGHRKIRPHNIATGDYPPRPQKQYPINPKAKPSIQIVIDDLLKQGVLTPQNSTMNTPVYPVPKPDGRWRMVLDYREVNKTIPLTAAQNQHSAGILATIVRQKYKTTLDLANGFWAHPITPESYWLTAFTWQGKQYCWTRLPQGFLNSPALFNADVVDLLKEIPNVQVYVDDIYLSHDDPKEHVQQLEKVFQILLQAGYVVSLKKSEIGQKTVEFLGFNITKEGRGLTDTFKTKLLNITPPKDLKQLQSILGLLNFARNFIPNFAELVQPLYNLIAPAKGKYIEWSEENTKQLNMVIEALNTASNLEERLPEQRLVIKVNTSPSAGYVRYYNETGKKPIMYLNYVFSKAELKFSMLEKLLTTMHKALIKAMDLAMGQEILVYSPIVSMTKIQKTPLPERKALPIRWITWMTYLEDPRIQFHYDKTLPELKHIPDVYTSSQSPVKHPSQYEGVFYTDGSAIKSPDPTKSNNAGMGIVHATYKPEYQVLNQWSIPLGNHTAQMAEIAAVEFACKKALKIPGPVLVITDSFYVAESANKELPYWKSNGFVNNKKKPLKHISKWKSIAECLSMKPDITIQHEKGISLQIPVFILKGNALADKLATQGSYVVN

SEQ ID NO: 353 - protein, 662 aa, synthetic construct
VPWLTQQPLQLTILVPLQEYQEKILSKTALPEDQKQQLKTLFVKYDNLWQHWENQVGHRKIRPHNIATGDYPPRPQKQYPINPKAKPSIQIVIDDLLKQGVLTPQNSTMNTPVYPVPKPDGRWRMVLDYREVNKTIPLTAAQNQHSAGILATIVRQKYKTTLDLANGFWAHPITPESYWLTAFTWQGKQYCWTRLPQGFLNSPALFNADVVDLLKEIPNVQVYVDDIYLSHDDPKEHVQQLEKVFQILLQAGYVVSLKKSEIGQKTVEFLGFNITKEGRGLTDTFKTKLLNITPPKDLKQLQSILGKLNFARNFIPNFAELVQPLYNLIAPAKGKYIEWSEENTKQLNMVIEALNTASNLEERLPEQRLVIKVNTSPSAGYVRYYNETGKKPIMYLNYVFSKAELKFSMLEKLLTTMHKALIKAMDLAMGQEILVYSPIVSMTKIQKTPLPERKALPIRWITWMTYLEDPRIQFHYDKTLPELKHIPDVYTSSQSPVKHPSQYEGVFYTDGSAIKSPDPTKSNNAGMGIVHATYKPEYQVLNQWSIPLGNHTAQMAEIAAVEFACKKALKIPGPVLVITDSFYVAESANKELPYWKSNGFVNNKKKPLKHISKWKSIAECLSMKPDITIQHEKGISLQIPVFILKGNALADKLATQGSYVVN

SEQ ID NO: 354 - protein, 669 aa, Gibbon ape leukemia virus
VLNLEEEYRLHEKPVPSSIDPSWLQLFPTVWAERAGMGLANQVPPVVVELRSGASPVAVRQYPMSKEAREGIRPHIQKFLDLGVLVPCRSPWNTPLLPVKKPGTNDYRPVQDLREINKRVQDIHPTVPNPYNLLSSLPPSYTWYSVLDLKDAFFCLRLHPNSQPLFAFEWKDPEKGNTGQLTWTRLPQGFKNSPTLFDEALHRDLAPFRALNPQVVLLQYVDDLLVAAPTYEDCKKGTQKLLQELSKLGYRVSAKKAQLCQREVTYLGYLLKEGKRWLTPARKATVMKIPVPTTPRQVREFLGTAGFCRLWIPGFASLAAPLYPLTKESIPFIWTEEHQQAFDHIKKALLSAPALALPDLTKPFTLYIDERAGVARGVLTQTLGPWRRPVAYLSKKLDPVASGWPTCLKAVAAVALLLKDADKLTLGQNVTVIASHSLESIVRQPPDRWMTNARMTHYQSLLLNERVSFAPPAVLNPATLLPVESEATPVHRCSEILAEETGTRRDLEDQPLPGVPTWYTDGSSFITEGKRRAGAPIVDGKRTVWASSLPEGTSAQKAELVALTQALRLAEGKNINIYTDSRYAFATAHIHGAIYKQRGLLTSAGKDIKNKEEILALLEAIHLPRRVAIIHCPGHQRGSNPVATGNRRADEAAKQAALSTRVLAGTTKP

SEQ ID NO: 355 - protein, 669 aa, synthetic construct
VLNLEEEYRLHEKPVPSSIDPSWLQLFPTVWAERAGMGLANQVPPVVVELRSGASPVAVRQYPMSKEAREGIRPHIQKFLDLGVLVPCRSPWNTPLLPVKKPGTNDYRPVQDLREINKRVQDIHPTVPNPYNLLSSLPPSYTWYSVLDLKDAFFCLRLHPNSQPLFAFEWKDPEKGNTGQLTWTRLPQGFKNSPTLFNEALHRDLAPFRALNPQVVLLQYVDDLLVAAPTYEDCKKGTQKLLQELSKLGYRVSAKKAQLCQREVTYLGYLLKEGKRWLTPARKATVMKIPVPTTPRQVREFLGTAGFCRLWIPGFASLAAPLYPLTKPSIPFIWTEEHQQAFDHIKKALLSAPALALPDLTKPFTLYIDERAGVARGVLTQTLGPWRRPVAYLSKKLDPVASGWPTCLKAVAAVALLLKDADKLTLGQNVTVIASHSLESIVRQPPDRWMTNARMTHYQSLLLNERVSFAPPAVLNPATLLPVESEATPVHRCSEILAEETGTRRDLEDQPLPGVPTWYTDGSSFITEGKRRAGAPIVDGKRTVWASSLPEGTSAQKAELVALTQALRLAEGKNINIYTDSRYAFATAHIHGAIYKQRGWLTSAGKDIKNKEEILALLEAIHLPRRVAIIHCPGHQRGSNPVATGNRRADEAAKQAALSTRVLAGTTKP

SEQ ID NO: 356 - protein, 669 aa, synthetic construct
VLNLEEEYRLHEKPVPSSIDPSWLQLFPTVWAERAGMGLANQVPPVVVELRSGASPVAVRQYPMSKEAREGIRPHIQKFLDLGVLVPCRSPWNTPLLPVKKPGTNDYRPVQDLREINKRVQDIHPTVPNPYNLLSSLPPSYTWYSVLDLKDAFFCLRLHPNSQPLFAFEWKDPEKGNTGQLTWTRLPQGFKNSPTLFNEALHRDLAPFRALNPQVVLLQYVDDLLVAAPTYEDCKKGTQKLLQELSKLGYRVSAKKAQLCQREVTYLGYLLKEGKRWLTPARKATVMKIPVPTTPRQVREFLGKAGFCRLFIPGFASLAAPLYPLTKPSIPFIWTEEHQQAFDHIKKALLSAPALALPDLTKPFTLYIDERAGVARGVLTQTLGPWRRPVAYLSKKLDPVASGWPTCLKAVAAVALLLKDADKLTLGQNVTVIASHSLESIVRQPPDRWMTNARMTHYQSLLLNERVSFAPPAVLNPATLLPVESEATPVHRCSEILAEETGTRRDLEDQPLPGVPTWYTDGSSFITEGKRRAGAPIVDGKRTVWASSLPEGTSAQKAELVALTQALRLAEGKNINIYTDSRYAFATAHIHGAIYKQRGWLTSAGKDIKNKEEILALLEAIHLPRRVAIIHCPGHQRGSNPVATGNRRADEAAKQAALSTRVLAGTTKP

SEQ ID NO: 357 - protein, 588 aa, unidentified
AVLGLEHLPRPPQISQFPLNPERLQALQHLVRKALEAGHIEPYTGPGNNPVFPVKKANGTWRFIHDLRATNSLTIDLSSSSPGPPDLSSLPTTLAHLQTIDLRDAFFQIPLPKQFQPYFAFTVPQQCNYGPGTRYAWKVLPQGFKNSPTLFEMQLAHILQPIRQAFPQCTILQYMDDILLASPSHEDLLLLSEATMASLISHGLPVSENKTQQTPGTIKFLGQIISPNHLTYDAVPTVPIRSRWALPELQALLGEIQWVSKGTPTLRQPLHSLYCALQRHTDPRDQIYLNPSQVQSLVQLRQALSQNCRSRLVQTLPLLGAIMLTLTGTTTVVFQSKEQWPLVWLHAPLPHTSQCPWGQLLASAVLLLDKYTLQSYGLLCQTIHHNISTQTFNQFIQTSDHPSVPILLHHSHRFKNLGAQTGELWNTFLKTAAPLAPVKALMPVFTLSPVIINTAPCLFSDGSTSRAAYILWDKQILSQRSFPLPPPHKSAQRAELLGLLHGLSSARSWRCLNIFLDSKYLYHYLRTLALGTFQGRSSQAPFQALLPRLLSRKVVYLHHVRSHTNLPDPISRLNALTDALLITPVLQL

SEQ ID NO: 358 - protein, 588 aa, synthetic construct
AVLGLEHLPRPPQISQFPLNPERLQALQHLVRKALEAGHIEPYTGPGNNPVFPVKKANGTWRFIHDLRATNSLTIDLSSSSPGPPDLSSLPTTLAHLQTIDLRDAFFQIPLPKQFQPYFAFTVPQQCNYGPGTRYAWKVLPQGFKNSPTLFQMQLAHILQPIRQAFPQCTILQYMDDILLASPSHEDLLLLSEATMASLISHGLPVSENKTQQTPGTIKFLGQIISPNHLTYDAVPTVPIRSRWALPELQALLGEIQWVSKGTPTLRQPLHSLYCALQPHTDPRDQIYLNPSQVQSLVQLRQALSQNCRSRLVQTLPLLGAIMLTLTGTTTVVFQSKEQWPLVWLHAPLPHTSQCPWGQLLASAVLLLDKYTLQSYGLLCQTIHHNISTQTFNQFIQTSDHPSVPILLHHSHRFKNLGAQTGELWNTFLKTAAPLAPVKALMPVFTLSPVIINTAPCLFSDGSTSRAAYILWDKQILSQRSFPLPPPHKSAQRAELLGLLHGLSSARSWRCLNIFLDSKYLYHYLRTLALGTFQGRSSQAPFQALLPRLLSRKVVYLHHVRSHTNLPDPISRLNALTDALLITPVLQL

SEQ ID NO: 359 - protein, 588 aa, synthetic construct
AVLGLEHLPRPPQISQFPLNPERLQALQHLVRKALEAGHIEPYTGPGNNPVFPVKKANGTWRFIHDLRATNSLTIDLSSSSPGPPDLSSPPTTLAHLQTIDLRDAFFQIPLPKQFQPYFAFTVPQQCNYGPGTRYAWKVLPQGFKNSPTLFQMQLAHILQPIRQAFPQCTILQYMDDILLASPSHEDLLLLSEATMASLISHGLPVSENKTQQTPGTIKFLGQIISPNHLTYDAVPTVPIRSRWALPELQALLGEIQWVSKGTPTLRQPLHSLYCALQPHTDPRDQIYLNPSQVQSLVQLRQALSQNCRSRLVQTLPLLGAIMLTLTGTTTVVFQSKEQWPLVWLHAPLPHTSQCPWGQLLASAVLLLDKYTLQSYGLLCQTIHHNISTQTFNQFIQTSDHPSVPILLHHSHRFKNLGAQTGELWNTFLKTAAPLAPVKALMPVFTLSPVIINTAPCLFSDGSTSRAAYILWDKQILSQRSFPLPPPHKSAQRAELLGLLHGLSSARSWRCLNIFLDSKYLYHYLRTLALGTFQGRSSQAPFQALLPRLLSRKVVYLHHVRSHTNLPDPISRLNALTDALLITPVLQL

SEQ ID NO: 360 - protein, 588 aa, unidentified
AVLGLEHLPRPPEISQFPLNPERLQALQHLVRKALEAGHIEPYTGPGNNPVFPVKKANGTWRFIHDLRATNSLTIDLSSSSPGPPDLSSLPTTLAHLQTIDLKDAFFQIPLPKQFQPYFAFTVPQQCNYGPGTRYAWRVLPQGFKNSPTLFEMQLAHILQPIRQAFPQCTILQYMDDILLASPSHADLQLLSEATMASLISHGLPVSENKTQQTPGTIKFLGQIISPNHLTYDAVPKVPIRSRWALPELQALLGEIQWVSKGTPTLRQPLHSLYCALQRHTDPRDQIYLNPSQVQSLVQLRQALSQNCRSRLVQTLPLLGAIMLTLTGTTTVVFQSKQQWPLVWLHAPLPHTSQCPWGQLLASAVLLLDKYTLQSYGLLCQTIHHNISTQTFNQFIQTSDHPSVPILLHHSHRFKNLGAQTGELWNTFLKTTAPLAPVKALMPVFTLSPVIINTAPCLFSDGSTSQAAYILWDKHILSQRSFPLPPPHKSAQRAELLGLLHGLSSARSWRCLNIFLDSKYLYHYLRTLALGTFQGRSSQAPFQALLPRLLSRKVVYLHHVRSHTNLPDPISRLNALTDALLITPVLQL

SEQ ID NO: 361 - protein, 588 aa, synthetic construct
AVLGLEHLPRPPEISQFPLNPERLQALQHLVRKALEAGHIEPYTGPGNNPVFPVKKANGTWRFIHDLRATNSLTIDLSSSSPGPPDLSSLPTTLAHLQTIDLKDAFFQIPLPKQFQPYFAFTVPQQCNYGPGTRYAWRVLPQGFKNSPTLFQMQLAHILQPIRQAFPQCTILQYMDDILLASPSHADLQLLSEATMASLISHGLPVSENKTQQTPGTIKFLGQIISPNHLTYDAVPKVPIRSRWALPELQALLGEIQWVSKGTPTLRQPLHSLYCALQPHTDPRDQIYLNPSQVQSLVQLRQALSQNCRSRLVQTLPLLGAIMLTLTGTTTVVFQSKQQWPLVWLHAPLPHTSQCPWGQLLASAVLLLDKYTLQSYGLLCQTIHHNISTQTFNQFIQTSDHPSVPILLHHSHRFKNLGAQTGELWNTFLKTTAPLAPVKALMPVFTLSPVIINTAPCLFSDGSTSQAAYILWDKHILSQRSFPLPPPHKSAQRAELLGLLHGLSSARSWRCLNIFLDSKYLYHYLRTLALGTFQGRSSQAPFQALLPRLLSRKVVYLHHVRSHTNLPDPISRLNALTDALLITPVLQL

SEQ ID NO: 362 - protein, 583 aa, unidentified
GLEHLPRPPEISQFPLNPERLQALQHLVRKALEAGHIEPYTGPGNNPVFPVKKANGTWRFIHDLRATNSLTVDLSSSSPGPPDLSSLPTTLAHLQTIDLKDAFFQIPLPKQFQPYFAFTVPQQCNYGPGTRYAWKVLPQGFKNSPTLFEMQLASILQPIRQAFPQCVILQYMDDILLASPSPEDLQQLSEATMASLISHGLPVSQDKTQQTPGTIKFLGQIISPNHITYDAVPTVPIRSRWALPELQALLGEIQWVSKGTPTLRQPLHSLYCALQGHTDPRDQIYLNPSQVQSLMQLQQALSQNCRSRLAQTLPLLGAIMLTLTGTTTVVFQSKQQWPLVWLHAPLPHTSQCPWGQLLASAVLLLDKYTLQSYGLLCQTIHHNISIQTFNQFIQTSDHPSVPILLHHSHRFKNLGAQTGELWNTFLKTAAPLAPVKALTPVFTLSPIIINTAPCLFSDGSTSQAAYILWDKHILSQRSFPLPPPHKSAQQAELLGLLHGLSSARSWHCLNIFLDSKYLYHYLRTLALGTFQGKSSQAPFQALLPRLLAHKVIYLHHVRSHTNLPDPISKLNALTDALLITPIL

SEQ ID NO: 363 - protein, 583 aa, synthetic construct
GLEHLPRPPEISQFPLNPERLQALQHLVRKALEAGHIEPYTGPGNNPVFPVKKANGTWRFIHDLRATNSLTVDLSSSSPGPPDLSSLPTTLAHLQTIDLKDAFFQIPLPKQFQPYFAFTVPQQCNYGPGTRYAWKVLPQGFKNSPTLFQMQLASILQPIRQAFPQCVILQYMDDILLASPSPEDLQQLSEATMASLISHGLPVSQDKTQQTPGTIKFLGQIISPNHITYDAVPTVPIRSRWALPELQALLGEIQWVSKGTPTLRQPLHSLYCALQGHTDPRDQIYLNPSQVQSLMQLQQALSQNCRSRLAQTLPLLGAIMLTLTGTTTVVFQSKQQWPLVWLHAPLPHTSQCPWGQLLASAVLLLDKYTLQSYGLLCQTIHHNISIQTFNQFIQTSDHPSVPILLHHSHRFKNLGAQTGELWNTFLKTAAPLAPVKALTPVFTLSPIIINTAPCLFSDGSTSQAAYILWDKHILSQRSFPLPPPHKSAQQAELLGLLHGLSSARSWHCLNIFLDSKYLYHYLRTLAWGTFQGKSSQAPFQALLPRLLAHKVIYLHHVRSHTNLPDPISKLNALTDALLITPIL

SEQ ID NO: 364 - protein, 583 aa, synthetic construct
GLEHLPRPPEISQFPLNPERLQALQHLVRKALEAGHIEPYTGPGNNPVFPVKKANGTWRFIHDLRATNSLTVDLSSSSPGPPDLSSPPTTLAHLQTIDLKDAFFQIPLPKQFQPYFAFTVPQQCNYGPGTRYAWKVLPQGFKNSPTLFQMQLASILQPIRQAFPQCVILQYMDDILLASPSPEDLQQLSEATMASLISHGLPVSQDKTQQTPGTIKFLGQIISPNHITYDAVPTVPIRSRWALPELQALLGEIQWVSKGTPTLRQPLHSLYCALQGHTDPRDQIYLNPSQVQSLMQLQQALSQNCRSRLAQTLPLLGAIMLTLTGTTTVVFQSKQQWPLVWLHAPLPHTSQCPWGQLLASAVLLLDKYTLQSYGLLCQTIHHNISIQTFNQFIQTSDHPSVPILLHHSHRFKNLGAQTGELWNTFLKTAAPLAPVKALTPVFTLSPIIINTAPCLFSDGSTSQAAYILWDKHILSQRSFPLPPPHKSAQQAELLGLLHGLSSARSWHCLNIFLDSKYLYHYLRTLAWGTFQGKSSQAPFQALLPRLLAHKVIYLHHVRSHTNLPDPISKLNALTDALLITPIL

SEQ ID NO: 365 - protein, 584 aa, unidentified
GLEHLPPPPEVSQFPLNPERLQALTDLVSRALEAKHIEPYQGPGNNPIFPVKKPNGKWRFIHDLRATNSVTRDLASPSPGPPDLTSLPQGLPHLRTIDLTDAFFQIPLPTIFQPYFAFTLPQPNNYGPGTRYSWRVLPQGFKNSPTLFEQQLSHILTPVRKTFPNSLIIQYMDDILLASPAPGELAALTDKVTNALTKEGLPLSPEKTQATPGPIHFLGQVISQDCITYETLPSINVKSTWSLAELQSMLGELQWVSKGTPVLRSSLHQLYLALRGHRDPRDTIKLTSIQVQALRTIQKALTLNCRSRLVNQLPILALIMLRPTGTTAVLFQTKQKWPLVWLHTPHPATSLRPWGQLLANAVIILDKYSLQHYGQVCKSFHHNISNQALTYYLHTSDQSSVAILLQHSHRFHNLGAQPSGPWRSLLQMPQIFQNIDVLRPPFTISPVVINHAPCLFSDGSASKAAFIIWDRQVIHQQVLSLPSTCSAQAGELFGLLAGLQKSQPWVALNIFLDSKFLIGHLRRMALGAFPGPSTQCELHTQLLPLLQGKTVYVHHVRSHTLLQDPISRLNEATDALMLAPLLPL

SEQ ID NO: 366 - protein, 584 aa, synthetic construct
GLEHLPPPPEVSQFPLNPERLQALTDLVSRALEAKHIEPYQGPGNNPIFPVKKPNGKWRFIHDLRATNSVTRDLASPSPGPPDLTSLPQGLPHLRTIDLTDAFFQIPLPTIFQPYFAFTLPQPNNYGPGTRYSWRVLPQGFKNSPTLFQQQLSHILTPVRKTFPNSLIIQYMDDILLASPAPGELAALTDKVTNALTKEGLPLSPEKTQATPGPIHFLGQVISQDCITYETLPSINVKSTWSLAELQSMLGELQWVSKGTPVLRSSLHQLYLALRGHRDPRDTIKLTSIQVQALRTIQKALTLNCRSRLVNQLPILALIMLRPTGTTAVLFQTKQKWPLVWLHTPHPATSLRPWGQLLANAVIILDKYSLQHYGQVCKSFHHNISNQALTYYLHTSDQSSVAILLQHSHRFHNLGAQPSGPWRSLLQMPQIFQNIDVLRPPFTISPVVINHAPCLFSDGSASKAAFIIWDRQVIHQQVLSLPSTCSAQAGELFGLLAGLQKSQPWVALNIFLDSKFLIGHLRRMAWGAFPGPSTQCELHTQLLPLLQGKTVYVHHVRSHTLLQDPISRLNEATDALMLAPLLPL

SEQ ID NO: 367 - protein, 584 aa, synthetic construct
GLEHLPPPPEVSQFPLNPERLQALTDLVSRALEAKHIEPYQGPGNNPIFPVKKPNGKWRFIHDLRATNSVTRDLASPSPGPPDLTSPPQGLPHLRTIDLTDAFFQIPLPTIFQPYFAFTLPQPNNYGPGTRYSWRVLPQGFKNSPTLFQQQLSHILTPVRKTFPNSLIIQYMDDILLASPAPGELAALTDKVTNALTKEGLPLSPEKTQATPGPIHFLGQVISQDCITYETLPSINVKSTWSLAELQSMLGELQWVSKGTPVLRSSLHQLYLALRGHRDPRDTIKLTSIQVQALRTIQKALTLNCRSRLVNQLPILALIMLRPTGTTAVLFQTKQKWPLVWLHTPHPATSLRPWGQLLANAVIILDKYSLQHYGQVCKSFHHNISNQALTYYLHTSDQSSVAILLQHSHRFHNLGAQPSGPWRSLLQMPQIFQNIDVLRPPFTISPVVINHAPCLFSDGSASKAAFIIWDRQVIHQQVLSLPSTCSAQAGELFGLLAGLQKSQPWVALNIFLDSKFLIGHLRRMAWGAFPGPSTQCELHTQLLPLLQGKTVYVHHVRSHTLLQDPISRLNEATDALMLAPLLPL

SEQ ID NO: 368 - protein, 584 aa, unidentified
GLEHLPPPPEVSQFPLNPERLQALTDLVSRALEAKHIEPYQGPGNNPIFPVKKPNGKWRFIHDLRATNSLTRDLASPSPGPPDLTSLPQDLPHLRTIDLTDAFFQIPLPAVFQPYFAFTLPQPNNHGPGTRYSWRVLPQGFKNSPTLFEQQLSHILAPVRKAFPNSLIIQYMDDILLASPALRELTALTDKVTNALTKEGLPMSLEKTQATPGSIHFLGQVISPDCITYETLPSIHVKSIWSLAELQSMLGELQWVSKGTPVLRSSLHQLYLALRGHRDPRDTIELTSTQVQALKTIQKALALNCRSRLVSQLPILALIILRPTGTTAVLFQTKQKWPLVWLHTPHPATSLRPWGQLLANAIITLDKYSLQHYGQICKSFHHNISNQALTYYLHTSDQSSVAILLQHSHRFHNLGAQPSGPWRSLLQVPQIFQNIDVLRPPFIISPVVIDHAPCLFSDGATSKAAFILWDKQVIHQQVLPLPSTCSAQAGELFGLLAGLQKSKPWPALNIFLDSKFLIGHLRRMALGAFLGPSTQCDLHARLFPLLQGKTVYVHHVRSHTLLQDPISRLNEATDALMLAPLLPL

SEQ ID NO: 369 - protein, 584 aa, synthetic construct
GLEHLPPPPEVSQFPLNPERLQALTDLVSRALEAKHIEPYQGPGNNPIFPVKKPNGKWRFIHDLRATNSLTRDLASPSPGPPDLTSLPQDLPHLRTIDLTDAFFQIPLPAVFQPYFAFTLPQPNNHGPGTRYSWRVLPQGFKNSPTLFQQQLSHILAPVRKAFPNSLIIQYMDDILLASPALRELTALTDKVTNALTKEGLPMSLEKTQATPGSIHFLGQVISPDCITYETLPSIHVKSIWSLAELQSMLGELQWVSKGTPVLRSSLHQLYLALRGHRDPRDTIELTSTQVQALKTIQKALALNCRSRLVSQLPILALIILRPTGTTAVLFQTKQKWPLVWLHTPHPATSLRPWGQLLANAIITLDKYSLQHYGQICKSFHHNISNQALTYYLHTSDQSSVAILLQHSHRFHNLGAQPSGPWRSLLQVPQIFQNIDVLRPPFIISPVVIDHAPCLFSDGATSKAAFILWDKQVIHQQVLPLPSTCSAQAGELFGLLAGLQKSKPWPALNIFLDSKFLIGHLRRMAWGAFLGPSTQCDLHARLFPLLQGKTVYVHHVRSHTLLQDPISRLNEATDALMLAPLLPL

SEQ ID NO: 370 - protein, 584 aa, synthetic construct
GLEHLPPPPEVSQFPLNPERLQALTDLVSRALEAKHIEPYQGPGNNPIFPVKKPNGKWRFIHDLRATNSLTRDLASPSPGPPDLTSPPQDLPHLRTIDLTDAFFQIPLPAVFQPYFAFTLPQPNNHGPGTRYSWRVLPQGFKNSPTLFQQQLSHILAPVRKAFPNSLIIQYMDDILLASPALRELTALTDKVTNALTKEGLPMSLEKTQATPGSIHFLGQVISPDCITYETLPSIHVKSIWSLAELQSMLGELQWVSKGTPVLRSSLHQLYLALRGHRDPRDTIELTSTQVQALKTIQKALALNCRSRLVSQLPILALIILRPTGTTAVLFQTKQKWPLVWLHTPHPATSLRPWGQLLANAIITLDKYSLQHYGQICKSFHHNISNQALTYYLHTSDQSSVAILLQHSHRFHNLGAQPSGPWRSLLQVPQIFQNIDVLRPPFIISPVVIDHAPCLFSDGATSKAAFILWDKQVIHQQVLPLPSTCSAQAGELFGLLAGLQKSKPWPALNIFLDSKFLIGHLRRMAWGAFLGPSTQCDLHARLFPLLQGKTVYVHHVRSHTLLQDPISRLNEATDALMLAPLLPL

SEQ ID NO: 371 - protein, 584 aa, synthetic construct
HLPPPPQVDQFPLNLPERLQALNDLVSKALEAGHIEPYSGPGNNPVFPVKKPNGKWRFIHDLRATNAITTTLTSPSPGPPDLTSLPTALPHLQTIDLTDAFFQIPLPKQYQPYFAFTIPQPCNYGPGTRYAWTVLPQGFKNSPTLFQQQLAAVLNPMRKMFPTSTIVQYMDDILLASPTNEELQQLSQLTLQALTTHGLPISQEKTQQTPGQIRFLGQVISPNHITYESTPTIPIKSQWTLTELQVILGEIQWVSKGTPILRKHLQSLYSALHPYRDPRACITLTPQQLHALHAIQQALQHNCRGRLNPALPLLGLISLSTSGTTSVIFQPKQNWPLAWLHTPHPPTSLCPWGHLLACTILTLDKYTLQHYGQLCQSFHHNMSKQALCDFLRNSPHPSVGILIHHMGRFHNLGSQPSGPWKTLLHLPTLLQEPRLLRPIFTLSPVVLDTAPCLFSDGSPQKAAYVLWDQTILQQDITPLPSHETHSAQKGELLALICGLRAAKPWPSLNIFLDSKYLIKYLHSLAIGAFLGTSAHQTLQAALPPLLQGKTIYLHHVRSHTNLPDPISTFNEYTDSLILAPLVPL

SEQ ID NO: 372 - protein, 581 aa, Jaagsiekte sheep retrovirus
PLGTSDSPVTHADPIDWKSEEPVWVDQWPLTQEKLSAAQQLVQEQLRLGHIEPSTSAWNSPIFVIKKKSGKWRLLQDLRKVNETMMHMGALQPGLPTPSAIPDKSYIIVIDLKDCFYTIPLAPQDCKRFAFSLPSVNFKEPMQRYQWRVLPQGMTNSPTLCQKFVATAIAPVRQRFPQLYLVHYMDDILLAHTDEHLLYQAFSILKQHLSLNGLVIADEKIQTHFPYNYLGFSLYPRVYNTQLVKLQTDHLKTLNDFQKLLGDINWIRPYLKLPTYTLQPLFDILKGDSDPASPRTLSLEGRTALQSIEEAIRQQQITYCDYQRSWGLYILPTPRAPTGVLYQDKPLRWIYLSATPTKHLLPYYELVAKIIAKGRHEAIQYFGMEPPFICVPYALEQQDWLFQFSDNWSIAFANYPGQITHHYPSDKLLQFASSHAFIFPKIVRRQPIPEATLIFTDGSSNGTAALIINHQTYYAQTSFSSAQVVELFAVHQALLTVPTSFNLFTDSSYVVGALQMIETVPIIGTTSPEVLNLFTLIQQVLHCRQHPCFFGHIRAHSTLPGALVQGNHTADVLTKQVFFQS

SEQ ID NO: 373 - protein, 581 aa, synthetic construct
PLGTSDSPVTHADPIDWKSEEPVWVDQWPLTQEKLSAAQQLVQEQLRLGHIEPSTSAWNSPIFVIKKKSGKWRLLQDLRKVNETMMHMGALQPGLPTPSPIPDKSYIIVIDLKDCFYTIPLAPQDCKRFAFSLPSVNFKEPMQRYQWRVLPQGMTNSPTLCQKFVATAIAPVRQRFPQLYLVHYMDDILLAHTDEHLLYQAFSILKQHLSLNGLVIADEKIQTHFPYNYLGFSLYPRVYNTQLVKLQTDHLKTLNDFQKLLGDINWIRPYLKLPTYTLQPLFDILKGDSDPASPRTLSLEGRTALQSIEEAIRQQQITYCDYQRSWGLYILPTPRAPTGVLYQDKPLRWIYLSATPTKHLLPYYELVAKIIAKGRHEAIQYFGMEPPFICVPYALEQQDWLFQFSDNWSIAFANYPGQITHHYPSDKLLQFASSHAFIFPKIVRRQPIPEATLIFTDGSSNGTAALIINHQTYYAQTSFSSAQVVELFAVHQALLTVPTSFNLFTDSSYVVGALQMIETVPIIGTTSPEVLNLFTLIQQVLHCRQHPCFFGHIRAHSTLPGALVQGNHTADVLTKQVFFQS

SEQ ID NO: 374 - protein, 793 aa, Koala retrovirus
TLGDQGSRGSDPLPEPRVTLTVEGIPTEFLVNTGAEHSVLTKPMGKMGSKRTVVAGATGSKVYPWTTKRLLKIGQKQVTHSFLVIPECPAPLLGRDLLTKLKAQIQFSTEGPQVTWEDRPAMCLVLNLEEEYRLHEKPVPPSIDPSWLQLFPMVWAEKAGMGLANQVPPVVVELKSDASPVAVRQYPMSKEAREGIRPHIQRFLDLGILVPCQSPWNTPLLPVKKPGTNDYRPVQDLREVNKRVQDIHPTVPNPYNLLSSLPPSHTWYSVLDLKDAFFCLKLHPNSQPLFAFEWRDPEKGNTGQLTWTRLPQGFKNSPTLFDEALHRDLASFRALNPQVVMLQYVDDLLVAAPTYRDCKEGTRRLLQELSKLGYRVSAKKAQLCREEVTYLGYLLKGGKRWLTPARKATVMKIPTPTTPRQVREFLGTAGFCRLWIPGFASLAAPLYPLTREKVPFTWTEAHQEAFGRIKEALLSAPALALPDLTKPFALYVDEKEGVARGVLTQTLGPWRRPVAYLSKKLDPVASGWPTCLKAIAAVALLLKDADKLTLGQNVLVIAPHNLESIVRQPPDRWMTNARMTHYQSLLLNERVSFAPPAILNPATLLPVESDDTPIHICSEILAEETGTRPDLRDQPLPGVPAWYTDGSSFIMDGRRQAGAAIVDNKRTVWASNLPEGTSAQKAELIALTQALRLAEGKSINIYTDSRYAFATAHVHGAIYKQRGLLTSAGKDIKNKEEILALLEAIHLPKRVAIIHCPGHQRGTDPVATGNRKADEAAKQAAQSTRILTETTKN

SEQ ID NO: 375 - protein, 793 aa, synthetic construct
TLGDQGSRGSDPLPEPRVTLTVEGIPTEFLVNTGAEHSVLTKPMGKMGSKRTVVAGATGSKVYPWTTKRLLKIGQKQVTHSFLVIPECPAPLLGRDLLTKLKAQIQFSTEGPQVTWEDRPAMCLVLNLEEEYRLHEKPVPPSIDPSWLQLFPMVWAEKAGMGLANQVPPVVVELKSDASPVAVRQYPMSKEAREGIRPHIQRFLDLGILVPCQSPWNTPLLPVKKPGTNDYRPVQDLREVNKRVQDIHPTVPNPYNLLSSLPPSHTWYSVLDLKDAFFCLKLHPNSQPLFAFEWRDPEKGNTGQLTWTRLPQGFKNSPTLFNEALHRDLASFRALNPQVVMLQYVDDLLVAAPTYRDCKEGTRRLLQELSKLGYRVSAKKAQLCREEVTYLGYLLKGGKRWLTPARKATVMKIPTPTTPRQVREFLGTAGFCRLWIPGFASLAAPLYPLTRPKVPFTWTEAHQEAFGRIKEALLSAPALALPDLTKPFALYVDEKEGVARGVLTQTLGPWRRPVAYLSKKLDPVASGWPTCLKAIAAVALLLKDADKLTLGQNVLVIAPHNLESIVRQPPDRWMTNARMTHYQSLLLNERVSFAPPAILNPATLLPVESDDTPIHICSEILAEETGTRPDLRDQPLPGVPAWYTDGSSFIMDGRRQAGAAIVDNKRTVWASNLPEGTSAQKAELIALTQALRLAEGKSINIYTDSRYAFATAHVHGAIYKQRGWLTSAGKDIKNKEEILALLEAIHLPKRVAIIHCPGHQRGTDPVATGNRKADEAAKQAAQSTRILTETTKN

SEQ ID NO: 376 - protein, 793 aa, synthetic construct
TLGDQGSRGSDPLPEPRVTLTVEGIPTEFLVNTGAEHSVLTKPMGKMGSKRTVVAGATGSKVYPWTTKRLLKIGQKQVTHSFLVIPECPAPLLGRDLLTKLKAQIQFSTEGPQVTWEDRPAMCLVLNLEEEYRLHEKPVPPSIDPSWLQLFPMVWAEKAGMGLANQVPPVVVELKSDASPVAVRQYPMSKEAREGIRPHIQRFLDLGILVPCQSPWNTPLLPVKKPGTNDYRPVQDLREVNKRVQDIHPTVPNPYNLLSSLPPSHTWYSVLDLKDAFFCLKLHPNSQPLFAFEWRDPEKGNTGQLTWTRLPQGFKNSPTLFNEALHRDLASFRALNPQVVMLQYVDDLLVAAPTYRDCKEGTRRLLQELSKLGYRVSAKKAQLCREEVTYLGYLLKGGKRWLTPARKATVMKIPTPTTPRQVREFLGKAGFCRLFIPGFASLAAPLYPLTRPKVPFTWTEAHQEAFGRIKEALLSAPALALPDLTKPFALYVDEKEGVARGVLTQTLGPWRRPVAYLSKKLDPVASGWPTCLKAIAAVALLLKDADKLTLGQNVLVIAPHNLESIVRQPPDRWMTNARMTHYQSLLLNERVSFAPPAILNPATLLPVESDDTPIHICSEILAEETGTRPDLRDQPLPGVPAWYTDGSSFIMDGRRQAGAAIVDNKRTVWASNLPEGTSAQKAELIALTQALRLAEGKSINIYTDSRYAFATAHVHGAIYKQRGWLTSAGKDIKNKEEILALLEAIHLPKRVAIIHCPGHQRGTDPVATGNRKADEAAKQAAQSTRILTETTKN

SEQ ID NO: 377 - protein, 702 aa, synthetic construct
LLGRDLLTKLKAQIQFSTEGPQVTWEDRPAMCLVLNLEEEYRLHEKPVPPSIDPSWLQLFPMVWAEKAGMGLANQVPPVVVELKSDASPVAVRQYPMSKEAREGIRPHIQRFLDLGILVPCQSPWNTPLLPVKKPGTNDYRPVQDLREVNKRVQDIHPTVPNPYNLLSSLPPSHTWYSVLDLKDAFFCLKLHPNSQPLFAFEWRDPEKGNTGQLTWTRLPQGFKNSPTLFDEALHRDLASFRALNPQVVMLQYVDDLLVAAPTYRDCKEGTRRLLQELSKLGYRVSAKKAQLCREEVTYLGYLLKGGKRWLTPARKATVMKIPTPTTPRQVREFLGTAGFCRLWIPGFASLAAPLYPLTREKVPFTWTEAHQEAFGRIKEALLSAPALALPDLTKPFALYVDEKEGVARGVLTQTLGPWRRPVAYLSKKLDPVASGWPTCLKAIAAVALLLKDADKLTLGQNVLVIAPHNLESIVRQPPDRWMTNARMTHYQSLLLNERVSFAPPAILNPATLLPVESDDTPIHICSEILAEETGTRPDLRDQPLPGVPAWYTDGSSFIMDGRRQAGAAIVDNKRTVWASNLPEGTSAQKAELIALTQALRLAEGKSINIYTDSRYAFATAHVHGAIYKQRGLLTSAGKDIKNKEEILALLEAIHLPKRVAIIHCPGHQRGTDPVATGNRKADEAAKQAAQSTRILTETTKN

SEQ ID NO: 378 - protein, 702 aa, synthetic construct
LLGRDLLTKLKAQIQFSTEGPQVTWEDRPAMCLVLNLEEEYRLHEKPVPPSIDPSWLQLFPMVWAEKAGMGLANQVPPVVVELKSDASPVAVRQYPMSKEAREGIRPHIQRFLDLGILVPCQSPWNTPLLPVKKPGTNDYRPVQDLREVNKRVQDIHPTVPNPYNLLSSLPPSHTWYSVLDLKDAFFCLKLHPNSQPLFAFEWRDPEKGNTGQLTWTRLPQGFKNSPTLFNEALHRDLASFRALNPQVVMLQYVDDLLVAAPTYRDCKEGTRRLLQELSKLGYRVSAKKAQLCREEVTYLGYLLKGGKRWLTPARKATVMKIPTPTTPRQVREFLGTAGFCRLWIPGFASLAAPLYPLTRPKVPFTWTEAHQEAFGRIKEALLSAPALALPDLTKPFALYVDEKEGVARGVLTQTLGPWRRPVAYLSKKLDPVASGWPTCLKAIAAVALLLKDADKLTLGQNVLVIAPHNLESIVRQPPDRWMTNARMTHYQSLLLNERVSFAPPAILNPATLLPVESDDTPIHICSEILAEETGTRPDLRDQPLPGVPAWYTDGSSFIMDGRRQAGAAIVDNKRTVWASNLPEGTSAQKAELIALTQALRLAEGKSINIYTDSRYAFATAHVHGAIYKQRGWLTSAGKDIKNKEEILALLEAIHLPKRVAIIHCPGHQRGTDPVATGNRKADEAAKQAAQSTRILTETTKN

SEQ ID NO: 379 - protein, 702 aa, synthetic construct
LLGRDLLTKLKAQIQFSTEGPQVTWEDRPAMCLVLNLEEEYRLHEKPVPPSIDPSWLQLFPMVWAEKAGMGLANQVPPVVVELKSDASPVAVRQYPMSKEAREGIRPHIQRFLDLGILVPCQSPWNTPLLPVKKPGTNDYRPVQDLREVNKRVQDIHPTVPNPYNLLSSLPPSHTWYSVLDLKDAFFCLKLHPNSQPLFAFEWRDPEKGNTGQLTWTRLPQGFKNSPTLFNEALHRDLASFRALNPQVVMLQYVDDLLVAAPTYRDCKEGTRRLLQELSKLGYRVSAKKAQLCREEVTYLGYLLKGGKRWLTPARKATVMKIPTPTTPRQVREFLGKAGFCRLFIPGFASLAAPLYPLTRPKVPFTWTEAHQEAFGRIKEALLSAPALALPDLTKPFALYVDEKEGVARGVLTQTLGPWRRPVAYLSKKLDPVASGWPTCLKAIAAVALLLKDADKLTLGQNVLVIAPHNLESIVRQPPDRWMTNARMTHYQSLLLNERVSFAPPAILNPATLLPVESDDTPIHICSEILAEETGTRPDLRDQPLPGVPAWYTDGSSFIMDGRRQAGAAIVDNKRTVWASNLPEGTSAQKAELIALTQALRLAEGKSINIYTDSRYAFATAHVHGAIYKQRGWLTSAGKDIKNKEEILALLEAIHLPKRVAIIHCPGHQRGTDPVATGNRKADEAAKQAAQSTRILTETTKN

SEQ ID NO: 380 - protein, 671 aa, unidentified
TLNLEDEYRLYETSAEPEVSPGSTWLSDFPQAWAETGGMGLAVRQAPLIIPLKATSTPVSIKQYPMSQEAKLGIKPHIQRLLDQGILVPCQSPWNTPLLPVKKPGTNDYRPVQDLREVNKRVEDIHPTVPNPYNLLSGLPPSHRWYTVLDLKDAFFCLRLHPTSQPLFAFEWRDPGMGISGQLTWTRLPQGFKNSPTLFDEALHRDLADFRIQHPDLILLQYVDDILLAATSELDCQQGTRALLLTLGNLGYRASAKKAQLCQKQVKYLGYLLKEGQRWLTEARKETVMGQPTPKTPRQLREFLGTAGFCRLWIPGFAEMAAPLYPLTKTGTLFNWGPDQQKAYQEIKQALLTAPALGLPDLTKPFELFVDEKQGYAKGVLTQKLGPWRRPVAYLSKKLDPVAAGWPPCLRMVAAIAVLRKDAGKLTMGQPLVILAPHAVEALVKQPPDRWLSNARMTHYQAMLLDTDRVQFGPVVALNPATLLPLPEEGAPHDCLEILAETHGTRPDLTDQPIPDADHTWYTDGSSFLQEGQRKAGAAVTTETEVIWARALPAGTSAQRAELIALTQALKMAEGKRLNVYTDSRYAFATAHIHGEIYRRRGLLTSEGREIKNKSEILALLKALFLPKRLSIIHCLGHQKGDSAEARGNRLADQAAREAAIKTPPDTSTLL

SEQ ID NO: 381 - protein, 671 aa, synthetic construct
TLNLEDEYRLYETSAEPEVSPGSTWLSDFPQAWAETGGMGLAVRQAPLIIPLKATSTPVSIKQYPMSQEAKLGIKPHIQRLLDQGILVPCQSPWNTPLLPVKKPGTNDYRPVQDLREVNKRVEDIHPTVPNPYNLLSGLPPSHRWYTVLDLKDAFFCLRLHPTSQPLFAFEWRDPGMGISGQLTWTRLPQGFKNSPTLFNEALHRDLADFRIQHPDLILLQYVDDILLAATSELDCQQGTRALLLTLGNLGYRASAKKAQLCQKQVKYLGYLLKEGQRWLTEARKETVMGQPTPKTPRQLREFLGTAGFCRLWIPGFAEMAAPLYPLTKPGTLFNWGPDQQKAYQEIKQALLTAPALGLPDLTKPFELFVDEKQGYAKGVLTQKLGPWRRPVAYLSKKLDPVAAGWPPCLRMVAAIAVLRKDAGKLTMGQPLVILAPHAVEALVKQPPDRWLSNARMTHYQAMLLDTDRVQFGPVVALNPATLLPLPEEGAPHDCLEILAETHGTRPDLTDQPIPDADHTWYTDGSSFLQEGQRKAGAAVTTETEVIWARALPAGTSAQRAELIALTQALKMAEGKRLNVYTDSRYAFATAHIHGEIYRRRGWLTSEGREIKNKSEILALLKALFLPKRLSIIHCLGHQKGDSAEARGNRLADQAAREAAIKTPPDTSTLL

SEQ ID NO: 382 - protein, 671 aa, synthetic construct
TLNLEDEYRLYETSAEPEVSPGSTWLSDFPQAWAETGGMGLAVRQAPLIIPLKATSTPVSIKQYPMSQEAKLGIKPHIQRLLDQGILVPCQSPWNTPLLPVKKPGTNDYRPVQDLREVNKRVEDIHPTVPNPYNLLSGLPPSHRWYTVLDLKDAFFCLRLHPTSQPLFAFEWRDPGMGISGQLTWTRLPQGFKNSPTLFNEALHRDLADFRIQHPDLILLQYVDDILLAATSELDCQQGTRALLLTLGNLGYRASAKKAQLCQKQVKYLGYLLKEGQRWLTEARKETVMGQPTPKTPRQLREFLGKAGFCRLFIPGFAEMAAPLYPLTKPGTLFNWGPDQQKAYQEIKQALLTAPALGLPDLTKPFELFVDEKQGYAKGVLTQKLGPWRRPVAYLSKKLDPVAAGWPPCLRMVAAIAVLRKDAGKLTMGQPLVILAPHAVEALVKQPPDRWLSNARMTHYQAMLLDTDRVQFGPVVALNPATLLPLPEEGAPHDCLEILAETHGTRPDLTDQPIPDADHTWYTDGSSFLQEGQRKAGAAVTTETEVIWARALPAGTSAQRAELIALTQALKMAEGKRLNVYTDSRYAFATAHIHGEIYRRRGWLTSEGREIKNKSEILALLKALFLPKRLSIIHCLGHQKGDSAEARGNRLADQAAREAAIKTPPDTSTLL

SEQ ID NO: 383 - protein, 671 aa, Murine leukemia virus
TLGIEDEYRLHETSTEPDVSLGSTWLSDFPQAWAETGGMGLAVRQAPLIIPLKATSTPVSIQQYPMSHEARLGIKPHIQRLLDQGILVPCQSPWNTPLLPVKKPGTNDYRPVQDLREVNKRVEDIHPTVPNPYNLLSGLPPSHQWYTVLDLKDAFFCLRLHPTSQPLFAFEWRDPGMGISGQLTWTRLPQGFKNSPTLFDEALHRDLADFRIQHPDLILLQYVDDILLAATSELDCQQGTRALLQTLGDLGYRASAKKAQICQKQVKYLGYLLREGQRWLTEARKETVMGQPVPKTPRQLREFLGTAGFCRLWIPGFAEMAAPLYPLTKTGTLFSWGPDQQKAYQEIKQALLTAPALGLPDLTKPFELFVDEKQGYAKGVLTQKLGPWRRPVAYLSKKLDPVAAGWPPCLRMVAAIAVLTKDAGKLTMGQPLVILAPHAVEALVKQPPDRWLSNARMTHYQAMLLDTDRVQFGPVVALNPATLLPLPEEGAPHDCLEILAETHGTRPDLTDQPIPDADHTWYTDGSSFLQEGQRKAGAAVTTETEVIWAGALPAGTSAQRAELIALTQALKMAEGKRLNVYTDSRYAFATAHIHGEIYRRRGLLTSEGREIKNKSEILALLKALFLPKRLSIIHCLGHQKGDSAEARGNRLADQAAREAAIKTPPDTSTLL

SEQ ID NO: 384 - protein, 671 aa, Murine leukemia virus; identical to SEQ ID NO: 383

SEQ ID NO: 385 - protein, 671 aa, synthetic construct
TLGIEDEYRLHETSTEPDVSLGSTWLSDFPQAWAETGGMGLAVRQAPLIIPLKATSTPVSIQQYPMSHEARLGIKPHIQRLLDQGILVPCQSPWNTPLLPVKKPGTNDYRPVQDLREVNKRVEDIHPTVPNPYNLLSGLPPSHQWYTVLDLKDAFFCLRLHPTSQPLFAFEWRDPGMGISGQLTWTRLPQGFKNSPTLFNEALHRDLADFRIQHPDLILLQYVDDILLAATSELDCQQGTRALLQTLGDLGYRASAKKAQICQKQVKYLGYLLREGQRWLTEARKETVMGQPVPKTPRQLREFLGTAGFCRLWIPGFAEMAAPLYPLTKPGTLFSWGPDQQKAYQEIKQALLTAPALGLPDLTKPFELFVDEKQGYAKGVLTQKLGPWRRPVAYLSKKLDPVAAGWPPCLRMVAAIAVLTKDAGKLTMGQPLVILAPHAVEALVKQPPDRWLSNARMTHYQAMLLDTDRVQFGPVVALNPATLLPLPEEGAPHDCLEILAETHGTRPDLTDQPIPDADHTWYTDGSSFLQEGQRKAGAAVTTETEVIWAGALPAGTSAQRAELIALTQALKMAEGKRLNVYTDSRYAFATAHIHGEIYRRRGWLTSEGREIKNKSEILALLKALFLPKRLSIIHCLGHQKGDSAEARGNRLADQAAREAAIKTPPDTSTLL

SEQ ID NO: 386 - protein, 671 aa, synthetic construct; identical to SEQ ID NO: 385

SEQ ID NO: 387 - protein, 671 aa, synthetic construct
LGIEDEYRLHETSTEPDVSLGSTWLSDFPQAWAETGGMGLAVRQAPLIIPLKATSTPVSIQQYPMSHEARLGIKPHIQRLLDQGILVPCQSPWNTPLLPVKKPGTNDYRPVQDLREVNKRVEDIHPTVPNPYNLLSGLPPSHQWYTVLDLKDAFFCLRLHPTSQPLFAFEWRDPGMGISGQLTWTRLPQGFKNSPTLFNEALHRDLADFRIQHPDLILLQYVDDILLAATSELDCQQGTRALLQTLGDLGYRASAKKAQICQKQVKYLGYLLREGQRWLTEARKETVMGQPVPKTPRQLREFLGKAGFCRLFIPGFAEMAAPLYPLTKPGTLFSWGPDQQKAYQEIKQALLTAPALGLPDLTKPFELFVDEKQGYAKGVLTQKLGPWRRPVAYLSKKLDPVAAGWPPCLRMVAAIAVLTKDAGKLTMGQPLVILAPHAVEALVKQPPDRWLSNARMTHYQAMLLDTDRVQFGPVVALNPATLLPLPEEGAPHDCLEILAETHGTRPDLTDQPIPDADHTWYTDGSSFLQEGQRKAGAAVTTETEVIWAGALPAGTSAQRAELIALTQALKMAEGKRLNVYTDSRYAFATAHIHGEIYRRRGWLTSEGREIKNKSEILALLKALFLPKRLSIIHCLGHQKGDSAEARGNRLADQAAREAAIKTPPDTSTLLI

SEQ ID NO: 388 - protein, 671 aa, synthetic construct; identical to SEQ ID NO: 387

SEQ ID NO: 389 - protein, 671 aa, Murine leukemia virus
TLNIEDEYRLHETSKEPDVSLGSTWLSDFPQAWAETGGMGLAVRQAPLIIPLKATSTPVSIKQYPMSQEARLGIKPHIQRLLDQGILVPCQSPWNTPLLPVKKPGTNDYRPVQDLREVNKRVEDIHPTVPNPYNLLSGLPPSHQWYTVLDLKDAFFCLRLHPTSQPLFAFEWRDPEMGISGQLTWTRLPQGFKNSPTLFDEALHRDLAGFRIQHPDLILLQYVDDLLLAATSELDCQQGTRALLQTLGDLGYRASAKKAQICQKQVKYLGYLLKEGQRWLTEARKETVMGQPIPKTPRQLREFLGTAGFCRLWIPGFAEMAAPLYPLTKTGTLFNWGPDQQKAFQEIKQALLTAPALGLPDLTKPFELFVDEKQGYAKGVLTQKLGPWRRPVAYLSKKLDPVAAGWPPCLRMVAAIAVLTKDAGKLTMGQPLVILAPHAVEALVKQPPDRWLSNARMTHYQALLLDTDRVQFGPVVALNPATLLPLPEEGLQHDCLDILAEAHGTRSDLMDQPLPDADHTWYTDGSSFLQEGQRKAGAAVTTETEVIWARALPAGTSAQRAELIALTQALKMAEGKKLNVYTDSRYAFATAHIHGEIYRRRGLLTSEGKEIKNKDEILALLKALFLPKRLSIIHCPGHQKGNSAEARGNRMADQAAREVATRETPETSTLL

SEQ ID NO: 390 - protein, 671 aa, synthetic construct
TLNIEDEYRLHETSKEPDVSLGSTWLSDFPQAWAETGGMGLAVRQAPLIIPLKATSTPVSIKQYPMSQEARLGIKPHIQRLLDQGILVPCQSPWNTPLLPVKKPGTNDYRPVQDLREVNKRVEDIHPTVPNPYNLLSGLPPSHQWYTVLDLKDAFFCLRLHPTSQPLFAFEWRDPEMGISGQLTWTRLPQGFKNSPTLFNEALHRDLAGFRIQHPDLILLQYVDDLLLAATSELDCQQGTRALLQTLGDLGYRASAKKAQICQKQVKYLGYLLKEGQRWLTEARKETVMGQPIPKTPRQLREFLGTAGFCRLWIPGFAEMAAPLYPLTKPGTLFNWGPDQQKAFQEIKQALLTAPALGLPDLTKPFELFVDEKQGYAKGVLTQKLGPWRRPVAYLSKKLDPVAAGWPPCLRMVAAIAVLTKDAGKLTMGQPLVILAPHAVEALVKQPPDRWLSNARMTHYQALLLDTDRVQFGPVVALNPATLLPLPEEGLQHDCLDILAEAHGTRSDLMDQPLPDADHTWYTDGSSFLQEGQRKAGAAVTTETEVIWARALPAGTSAQRAELIALTQALKMAEGKKLNVYTDSRYAFATAHIHGEIYRRRGWLTSEGKEIKNKDEILALLKALFLPKRLSIIHCPGHQKGNSAEARGNRMADQAAREVATRETPETSTLL

SEQ ID NO: 391 - protein, 671 aa, synthetic construct
TLNIEDEYRLHETSKEPDVSLGSTWLSDFPQAWAETGGMGLAVRQAPLIIPLKATSTPVSIKQYPMSQEARLGIKPHIQRLLDQGILVPCQSPWNTPLLPVKKPGTNDYRPVQDLREVNKRVEDIHPTVPNPYNLLSGLPPSHQWYTVLDLKDAFFCLRLHPTSQPLFAFEWRDPEMGISGQLTWTRLPQGFKNSPTLFNEALHRDLAGFRIQHPDLILLQYVDDLLLAATSELDCQQGTRALLQTLGDLGYRASAKKAQICQKQVKYLGYLLKEGQRWLTEARKETVMGQPIPKTPRQLREFLGKAGFCRLFIPGFAEMAAPLYPLTKPGTLFNWGPDQQKAFQEIKQALLTAPALGLPDLTKPFELFVDEKQGYAKGVLTQKLGPWRRPVAYLSKKLDPVAAGWPPCLRMVAAIAVLTKDAGKLTMGQPLVILAPHAVEALVKQPPDRWLSNARMTHYQALLLDTDRVQFGPVVALNPATLLPLPEEGLQHDCLDILAEAHGTRSDLMDQPLPDADHTWYTDGSSFLQEGQRKAGAAVTTETEVIWARALPAGTSAQRAELIALTQALKMAEGKKLNVYTDSRYAFATAHIHGEIYRRRGWLTSEGKEIKNKDEILALLKALFLPKRLSIIHCPGHQKGNSAEARGNRMADQAAREVATRETPETSTLL

SEQ ID NO: 392 - protein, 671 aa, unidentified
TLNIEDEYRLHETSKGPDVPLGSTWLSDFPQAWAETGGMGLAFRQAPLIISLKATSTPVSIKQYPMSQEARLGIKPHIQRLLDQGILVPCQSPWNTPLLPVKKPGTNDYRPVQDLREVNKRVEDIHPTVPNPYNLLSGLPPSHQWYTVLDLKDAFFCLRLHPTSQSLFAFEWKDPEMGISGQLTWTRLPQGFKNSPTLFDEALHRDLADFRIQHPDLILLQYVDDLLLAATSELDCQQGTRALLQTLGDLGYRASAKKAQICQKQVKYLGYLLKEGQRWLTEARKETVMGQPTPKTPRQLREFLGTAGLCRLWIPGFAEMAAPLYPLTKTGTLFKWGPDQQKAYQEIKQALLTAPALGLPDLTKPFELFVDEKQGYAKGVLTQKLGPWRRPVAYLSKKLDPVAAGWPPCLRMVAAIAVLTKDVGKLTMGQPLVILAPHAVEALVKQPPDRWLSNARMTHYQALLLDTDRVQFGPIVALNPATLLPLPEEGLQHDCLDILAEAHGTRPDLTDQPLPDADHTWYTDGSSFLQEGQRRAGAAVTTETEVIWAKALPAGTSAQRAELIALTQALKMAAGKKLNVYTDSRYAFATAHIHGEIYRRRGLLTSEGKEIKNKDEILALLKALFLPKRLSIIHCPGHQKGNHAEARGNRMADQAAREVATRETPETSTLL

SEQ ID NO: 393 - protein, 671 aa, synthetic construct
TLNIEDEYRLHETSKGPDVPLGSTWLSDFPQAWAETGGMGLAFRQAPLIISLKATSTPVSIKQYPMSQEARLGIKPHIQRLLDQGILVPCQSPWNTPLLPVKKPGTNDYRPVQDLREVNKRVEDIHPTVPNPYNLLSGLPPSHQWYTVLDLKDAFFCLRLHPTSQSLFAFEWKDPEMGISGQLTWTRLPQGFKNSPTLFNEALHRDLADFRIQHPDLILLQYVDDLLLAATSELDCQQGTRALLQTLGDLGYRASAKKAQICQKQVKYLGYLLKEGQRWLTEARKETVMGQPTPKTPRQLREFLGTAGLCRLWIPGFAEMAAPLYPLTKPGTLFKWGPDQQKAYQEIKQALLTAPALGLPDLTKPFELFVDEKQGYAKGVLTQKLGPWRRPVAYLSKKLDPVAAGWPPCLRMVAAIAVLTKDVGKLTMGQPLVILAPHAVEALVKQPPDRWLSNARMTHYQALLLDTDRVQFGPIVALNPATLLPLPEEGLQHDCLDILAEAHGTRPDLTDQPLPDADHTWYTDGSSFLQEGQRRAGAAVTTETEVIWAKALPAGTSAQRAELIALTQALKMAAGKKLNVYTDSRYAFATAHIHGEIYRRRGWLTSEGKEIKNKDEILALLKALFLPKRLSIIHCPGHQKGNHAEARGNRMADQAAREVATRETPETSTLL

SEQ ID NO: 394 - protein, 671 aa, synthetic construct
TLNIEDEYRLHETSKGPDVPLGSTWLSDFPQAWAETGGMGLAFRQAPLIISLKATSTPVSIKQYPMSQEARLGIKPHIQRLLDQGILVPCQSPWNTPLLPVKKPGTNDYRPVQDLREVNKRVEDIHPTVPNPYNLLSGLPPSHQWYTVLDLKDAFFCLRLHPTSQSLFAFEWKDPEMGISGQLTWTRLPQGFKNSPTLFNEALHRDLADFRIQHPDLILLQYVDDLLLAATSELDCQQGTRALLQTLGDLGYRASAKKAQICQKQVKYLGYLLKEGQRWLTEARKETVMGQPTPKTPRQLREFLGKAGLCRLFIPGFAEMAAPLYPLTKPGTLFKWGPDQQKAYQEIKQALLTAPALGLPDLTKPFELFVDEKQGYAKGVLTQKLGPWRRPVAYLSKKLDPVAAGWPPCLRMVAAIAVLTKDVGKLTMGQPLVILAPHAVEALVKQPPDRWLSNARMTHYQALLLDTDRVQFGPIVALNPATLLPLPEEGLQHDCLDILAEAHGTRPDLTDQPLPDADHTWYTDGSSFLQEGQRRAGAAVTTETEVIWAKALPAGTSAQRAELIALTQALKMAAGKKLNVYTDSRYAFATAHIHGEIYRRRGWLTSEGKEIKNKDEILALLKALFLPKRLSIIHCPGHQKGNHAEARGNRMADQAAREVATRETPETSTLL

SEQ ID NO: 395 - protein, 671 aa, synthetic construct
TLNIEDEYRLHETSKGPDVPLGSTWLSDFPQAWAETGGMGLAVRQAPLIIPLKATSTPVSIKQYPMSQEARLGIKPHIQRLLDQGILVPCQSPWNTPLLPVKKPGTNDYRPVQDLREVNKRVEDIHPTVPNPYNLLSGLPPSHQWYTVLDLKDAFFCLRLHPTSQSLFAFEWRDPEMGISGQLTWTRLPQGFKNSPTLFNEALHRDLADFRIQHPDLILLQYVDDLLLAATSELDCQQGTRALLQTLGDLGYRASAKKAQICQKQVKYLGYLLKEGQRWLTEARKETVMGQPTPKTPRQLREFLGTAGFCRLWIPGFAEMAAPLYPLTKPGTLFEWGPDQQKAYQEIKQALLTAPALGLPDLTKPFELFVDEKQGYAKGVLTQKLGPWRRPVAYLSKKLDPVAAGWPPCLRMVAAIAVLTKDAGKLTMGQPLVILAPHAVEALVKQPPDRWLSNARMTHYQALLLDTDRVQFGPIVALNPATLLPLPEEGLQHDCLDILAEAHGTRPDLTDQPLPDADHTWYTDGSSFLQEGQRKAGAAVTTETEVVWAKALPAGTSAQRAELIALTQALKMAEGKKLNVYTDSRYAFATAHIHGEIYRRRGWLTSEGKEIKNKDEILALLKALFLPKRLSIIHCPGHQKGNRAEARGNRMADQAAREVATRETPETSTLL

SEQ ID NO: 396 - protein, 671 aa, synthetic construct
TLNIEDEYRLHETSKGPDVPLGSTWLSDFPQAWAETGGMGLAVRQAPLIIPLKATSTPVSIKQYPMSQEARLGIKPHIQRLLDQGILVPCQSPWNTPLLPVKKPGTNDYRPVQDLREVNKRVEDIHPTVPNPYNLLSGLPPSHQWYTVLDLKDAFFCLRLHPTSQSLFAFEWRDPEMGISGQLTWTRLPQGFKNSPTLFNEALHRDLADFRIQHPDLILLQYVDDLLLAATSELDCQQGTRALLQTLGDLGYRASAKKAQICQKQVKYLGYLLKEGQRWLTEARKETVMGQPTPKTPRQLREFLGKAGFCRLFIPGFAEMAAPLYPLTKPGTLFEWGPDQQKAYQEIKQALLTAPALGLPDLTKPFELFVDEKQGYAKGVLTQKLGPWRRPVAYLSKKLDPVAAGWPPCLRMVAAIAVLTKDAGKLTMGQPLVILAPHAVEALVKQPPDRWLSNARMTHYQALLLDTDRVQFGPIVALNPATLLPLPEEGLQHDCLDILAEAHGTRPDLTDQPLPDADHTWYTDGSSFLQEGQRKAGAAVTTETEVVWAKALPAGTSAQRAELIALTQALKMAEGKKLNVYTDSRYAFATAHIHGEIYRRRGWLTSEGKEIKNKDEILALLKALFLPKRLSIIHCPGHQKGNRAEARGNRMADQAAREVATRETPETSTLL

SEQ ID NO: 397 - protein, 671 aa, unidentified
TLNIEDEHRLHETSKEPDVSLGSTWLSDFPQAWAETGGMGLAVRQAPLIIPLKATSTPVSIKQYPMSQEARLGIKPHIQRLLDQGILVPCQSPWNTPLLPVKKPGTNDYRPVQDLREVNKRVEDIHPTVPNPYNLLSGLPPSHQWYTVLDLKDAFFCLRLHPTSQPLFAFEWRDPEMGISGQLTWTRLPQGFKNSPTLFDEALHRDLADFRIQHPDLILLQYVDDLLLAATSELDCQQGTRALLQTLGNLGYRASAKKAQICQKQVKYLGYLLKEGQRWLTEARKETVMGQPTPKTPRQLREFLGTAGFCRLWIPGFAEMAAPLYPLTKTGTLFNWGPDQQKAYQEIKQALLTAPALGLPDLTKPFELFVDEKQGYAKGVLTQKLGPWRRPVAYLSKKLDPVAAGWPPCLRMVAAIAVLTKDAGKLTMGQPLVILAPHAVEALVKQPPDRWLSNARMTHYQALLLDTDRVQFGPVVALNPATLLPLPEEGLQHNCLDILAEAHGTRPDLTDQPLPDADHTWYTDGSSLLQEGQRKAGAAVTTETEVIWAKALPAGTSAQRAELIALTQALKMAEGKKLNVYTDSRYAFATAHIHGEIYRRRGLLTSEGKEIKNKDEILALLKALFLPKRLSIIHCPGHQKGHSAEARGNRMADQAARKAAITETPDTSTLL

SEQ ID NO: 398 - protein, 677 aa, unidentified
TLNIEDEYRLHETSKEPDVSLGSTWLSDFPQAWAETGGMGLAVRQAPLIIPLKATSTPVSIKQYPMSQEARLGIKPHIQRLLDQGILVPCQSPWNTPLLPVKKPGTNDYRPVQDLREVNKRVEDIHPTVPNPYNLLSGLPPSHQWYTVLDLKDAFFCLRLHPTSQPLFAFEWRDPEMGISGQLTWTRLPQGFKNSPTLFNEALHRDLADFRIQHPDLILLQYVDDLLLAATSELDCQQGTRALLQTLGNLGYRASAKKAQICQKQVKYLGYLLKEGQRWLTEARKETVMGQPTPKTPRQLREFLGKAGFCRLFIPGFAEMAAPLYPLTKPGTLFNWGPDQQKAYQEIKQALLTAPALGLPDLTKPFELFVDEKQGYAKGVLTQKLGPWRRPVAYLSKKLDPVAAGWPPCLRMVAAIAVLTKDAGKLTMGQPLVILAPHAVEALVKQPPDRWLSNARMTHYQALLLDTDRVQFGPVVALNPATLLPLPEEGLQHNCLDILAEAHGTRPDLTDQPLPDADHTWYTDGSSLLQEGQRKAGAAVTTETEVIWAKALPAGTSAQRAELIALTQALKMAEGKKLNVYTDSRYAFATAHIHGEIYRRRGWLTSEGKEIKNKDEILALLKALFLPKRLSIIHCPGHQKGHSAEARGNRMADQAARKAAITETPDTSTLLIENSSP

SEQ ID NO: 399 - protein, 671 aa, unidentified; identical to SEQ ID NO: 397

SEQ ID NO: 400 - protein, 671 aa, synthetic construct
TLNIEDEHRLHETSKEPDVSLGSTWLSDFPQAWAETGGMGLAVRQAPLIIPLKATSTPVSIKQYPMSQEARLGIKPHIQRLLDQGILVPCQSPWNTPLLPVKKPGTNDYRPVQDLREVNKRVEDIHPTVPNPYNLLSGLPPSHQWYTVLDLKDAFFCLRLHPTSQPLFAFEWRDPEMGISGQLTWTRLPQGFKNSPTLFNEALHRDLADFRIQHPDLILLQYVDDLLLAATSELDCQQGTRALLQTLGNLGYRASAKKAQICQKQVKYLGYLLKEGQRWLTEARKETVMGQPTPKTPRQLREFLGTAGFCRLWIPGFAEMAAPLYPLTKPGTLFNWGPDQQKAYQEIKQALLTAPALGLPDLTKPFELFVDEKQGYAKGVLTQKLGPWRRPVAYLSKKLDPVAAGWPPCLRMVAAIAVLTKDAGKLTMGQPLVILAPHAVEALVKQPPDRWLSNARMTHYQALLLDTDRVQFGPVVALNPATLLPLPEEGLQHNCLDILAEAHGTRPDLTDQPLPDADHTWYTDGSSLLQEGQRKAGAAVTTETEVIWAKALPAGTSAQRAELIALTQALKMAEGKKLNVYTDSRYAFATAHIHGEIYRRRGWLTSEGKEIKNKDEILALLKALFLPKRLSIIHCPGHQKGHSAEARGNRMADQAARKAAITETPDTSTLL

SEQ ID NO: 401 - protein, 671 aa, synthetic construct; identical to SEQ ID NO: 400

SEQ ID NO: 402 - protein, 671 aa, synthetic construct
TLNIEDEHRLHETSKEPDVSLGSTWLSDFPQAWAETGGMGLAVRQAPLIIPLKATSTPVSIKQYPMSQEARLGIKPHIQRLLDQGILVPCQSPWNTPLLPVKKPGTNDYRPVQDLREVNKRVEDIHPTVPNPYNLLSGLPPSHQWYTVLDLKDAFFCLRLHPTSQPLFAFEWRDPEMGISGQLTWTRLPQGFKNSPTLFNEALHRDLADFRIQHPDLILLQYVDDLLLAATSELDCQQGTRALLQTLGNLGYRASAKKAQICQKQVKYLGYLLKEGQRWLTEARKETVMGQPTPKTPRQLREFLGKAGFCRLFIPGFAEMAAPLYPLTKPGTLFNWGPDQQKAYQEIKQALLTAPALGLPDLTKPFELFVDEKQGYAKGVLTQKLGPWRRPVAYLSKKLDPVAAGWPPCLRMVAAIAVLTKDAGKLTMGQPLVILAPHAVEALVKQPPDRWLSNARMTHYQALLLDTDRVQFGPVVALNPATLLPLPEEGLQHNCLDILAEAHGTRPDLTDQPLPDADHTWYTDGSSLLQEGQRKAGAAVTTETEVIWAKALPAGTSAQRAELIALTQALKMAEGKKLNVYTDSRYAFATAHIHGEIYRRRGWLTSEGKEIKNKDEILALLKALFLPKRLSIIHCPGHQKGHSAEARGNRMADQAARKAAITETPDTSTLL

SEQ ID NO: 403 - protein, 671 aa, synthetic construct; identical to SEQ ID NO: 402

SEQ ID NO: 404 - protein, 691 aa, unidentified
TLNIEDEYRLHETSKEPDVSLGSTWLSDFPQAWAETGGMGLAVRQAPLIIPLKATSTPVSIKQYPMSQEARLGIKPHIQRLLDQGILVPCQSPWNTPLLPVKKPGTNDYRPVQDLREVNKRVEDIHPTVPNPYNLLSGLPPSHQWYTVLDLKDAFFCLRLHPTSQPLFAFEWRDPEMGISGQLTWTRLPQGFKNSPTLFNEALHRDLADFRIQHPDLILLQYVDDLLLAATSELDCQQGTRALLQTLGNLGYRASAKKAQICQKQVKYLGYLLKEGQRWLTEARKETVMGQPTPKTPRQLREFLGKAGFCRLFIPGFAEMAAPLYPLTKPGTLFNWGPDQQKAYQEIKQALLTAPALGLPDLTKPFELFVDEKQGYAKGVLTQKLGPWRRPVAYLSKKLDPVAAGWPPCLRMVAAIAVLTKDAGKLTMGQPLVILAPHAVEALVKQPPDRWLSNARMTHYQALLLDTDRVQFGPVVALNPATLLPLPEEGLQHNCLDILAEAHGTRPDLTDQPLPDADHTWYTDGSSLLQEGQRKAGAAVTTETEVIWAKALPAGTSAQRAELIALTQALKMAEGKKLNVYTDSRYAFATAHIHGEIYRRRGWLTSEGKEIKNKDEILALLKALFLPKRLSIIHCPGHQKGHSAEARGNRMADQAARKAAITETPDTSTLLIENSSPSGGSKRTADGSEFE

SEQ ID NO: 405 - protein, 691 aa, unidentified; identical to SEQ ID NO: 404

SEQ ID NO: 406 - protein, 671 aa, unidentified
TLNIEDEYRLHEISTEPDVSPGSTWLSDFPQAWAETGGMGLAVRQAPLIIPLKATSTPVSIKQYPMSQEAKLGIKPHIQRLLDQGILVPCQSPWNTPLLPVKKPGTNDYRPVQGLREVNKRVEDIHPTVPNPYNLLSGLPTSHRWYTVLDLKDAFFCLRLHPTSQPLFASEWRDPGMGISGQLTWTRLPQGFKNSPTLFDEALHRGLADFRIQHPDLILLQYVDDLLLAATSELDCQQGTRALLKTLGNLGYRASAKKAQICQKQVKYLGYLLREGQRWLTEARKETVMGQPTPKTPRQLREFLGTAGFCRLWIPRFAEMAAPLYPLTKTGTLFNWGPDQQKAYHEIKQALLTAPALGLPDLTKPFELFVDEKQGYAKGVLTQKLGPWRRPVAYLSKKLDPVAAGWPPCLRMVAAIAVLTKDAGKLTMGQPLVILAPHAVEALVKQPPDRWLSNARMTHYQAMLLDTDRVQFGPVVALNPATLLPLPEEGAPHDCLEILAETHGTEPDLTDQPIPDADHTWYTDGSSFLQEGQRKAGAAVTTETEVIWARALPAGTSAQRAELIALTQALKMAEGKRLNVYTDSRYAFATAHIHGEIYKRRGLLTSEGREIKNKSEILALLKALFLPKRLSIIHCLGHQKGDSAEARGNRLADQAAREAAIKTPPDTSTLL

SEQ ID NO: 407 - protein, 671 aa, synthetic construct
TLNIEDEYRLHEISTEPDVSPGSTWLSDFPQAWAETGGMGLAVRQAPLIIPLKATSTPVSIKQYPMSQEAKLGIKPHIQRLLDQGILVPCQSPWNTPLLPVKKPGTNDYRPVQGLREVNKRVEDIHPTVPNPYNLLSGLPTSHRWYTVLDLKDAFFCLRLHPTSQPLFASEWRDPGMGISGQLTWTRLPQGFKNSPTLFNEALHRGLADFRIQHPDLILLQYVDDLLLAATSELDCQQGTRALLKTLGNLGYRASAKKAQICQKQVKYLGYLLREGQRWLTEARKETVMGQPTPKTPRQLREFLGTAGFCRLWIPRFAEMAAPLYPLTKPGTLFNWGPDQQKAYHEIKQALLTAPALGLPDLTKPFELFVDEKQGYAKGVLTQKLGPWRRPVAYLSKKLDPVAAGWPPCLRMVAAIAVLTKDAGKLTMGQPLVILAPHAVEALVKQPPDRWLSNARMTHYQAMLLDTDRVQFGPVVALNPATLLPLPEEGAPHDCLEILAETHGTEPDLTDQPIPDADHTWYTDGSSFLQEGQRKAGAAVTTETEVIWARALPAGTSAQRAELIALTQALKMAEGKRLNVYTDSRYAFATAHIHGEIYKRRGWLTSEGREIKNKSEILALLKALFLPKRLSIIHCLGHQKGDSAEARGNRLADQAAREAAIKTPPDTSTLL

SEQ ID NO: 408 - protein, 691 aa, Mouse mammary tumor virus
WVQEISDSRPMLHIYLNGRRFLGLLNTGADKTCIAGRDWPANWPIHQTESSLQGLGMACGVARSSQPLRWQHEDKSGIIHPFVIPTLPFTLWGRDIMKDIKVRLMTDSPDDSQDLMIGAIESNLFADQISWKSDQPVWLNQWPLKQEKLQALQQLVTEQLQLGHLEESNSPWNTPVFVIKKKSGKWRLLQDLRAVNATMHDMGALQPGLPSPVAVPKGWEIIIIDLQDCFFNIKLHPEDCKRFAFSVPSPNFKRPYQRFQWKVLPQGMKNSPTLCQKFVDKAILTVRDKYQDSYIVHYMDDILLAHPSRSIVDEILTSMIQALNKHGLVVSTEKIQKYDNLKYLGTHIQGDSVSYQKLQIRTDKLRTLNDFQKLLGNINWIRPFLKLTTGELKPLFEILNGDSNPISTRKLTPEACKALQLMNERLSTARVKRLDLSQPWSLCILKTEYTPTACLWQDGVVEWIHLPHISPKVITPYDIFCTQLIIKGRHRSKELFSKDPDYIVVPYTKVQFDLLLQEKEDWPISLLGFLGEVHFHLPKDPLLTFTLQTAIIFPHMTSTTPLEKGIVIFTDGSANGRSVTYIQGREPIIKENTQNTAQQAEIVAVITAFEEVSQPFNLYTDSKYVTGLFPEIETATLSPRTKIYTELKHLQRLIHKRQEKFYIGHIRGHTGLPGPLAQGNAYADSLTRILT

SEQ ID NO: 409 - protein, 691 aa, Mouse mammary tumor virus; identical to SEQ ID NO: 408

SEQ ID NO: 410 - protein, 691 aa, synthetic construct
WVQEISDSRPMLHIYLNGRRFLGLLNTGADKTCIAGRDWPANWPIHQTESSLQGLGMACGVARSSQPLRWQHEDKSGIIHPFVIPTLPFTLWGRDIMKDIKVRLMTDSPDDSQDLMIGAIESNLFADQISWKSDQPVWLNQWPLKQEKLQALQQLVTEQLQLGHLEESNSPWNTPVFVIKKKSGKWRLLQDLRAVNATMHDMGALQPGLPSPVAVPKGWEIIIIDLQDCFFNIKLHPEDCKRFAFSVPSPNFKRPYQRFQWKVLPQGMKNSPTLCQKFVDKAILTVRDKYQDSYIVHYMDDILLAHPSRSIVDEILTSMIQALNKHGLVVSTEKIQKYDNLKYLGTHIQGDSVSYQKLQIRTDKLRTLNDFQKLLGNINWIRPFLKLTTGELKPLFEILNPDSNPISTRKLTPEACKALQLMNERLSTARVKRLDLSQPWSLCILKTEYTPTACLWQDGVVEWIHLPHISPKVITPYDIFCTQLIIKGRHRSKELFSKDPDYIVVPYTKVQFDLLLQEKEDWPISLLGFLGEVHFHLPKDPLLTFTLQTAIIFPHMTSTTPLEKGIVIFTDGSANGRSVTYIQGREPIIKENTQNTAQQAEIVAVITAFEEVSQPFNLYTDSKYVTGLFPEIETATLSPRTKIYTELKHLQRLIHKRQEKFYIGHIRGHTGLPGPLAQGNAYADSLTRILT

SEQ ID NO: 411 - protein, 691 aa, synthetic construct
VQEISDSRPMLHIYLNGRRFLGLLDTGADKTCIAGRDWPANWPIHQTESSLQGLGMACGVARSSQPLRWQHEDKSGIIHPFVIPTLPFTLWGRDIMKDIKVRLMTDSPDDSQDLMIGAIESNLFADQISWKSDQPVWLNQWPLKQEKLQALQQLVTEQLQLGHLEESNSPWNTPVFVIKKKSGKWRLLQDLRAVNATMHDMGALQPGLPSPVAVPKGWEIIIIDLQDCFFNIKLHPEDCKRFAFSVPSPNFKRPYQRFQWKVLPQGMKNSPTLCQKFVDKAILTVRDKYQDSYIVHYMDDILLAHPSRSIVDEILTSMIQALNKHGLVVSTEKIQKYDNLKYLGTHIQGDSVSYQKLQIRTDKLRTLNDFQKLLGNINWIRPFLKLTTGELKPLFEILNPDSNPISTRKLTPEACKALQLMNERLSTARVKRLDLSQPWSLCILKTEYTPTACLWQDGVVEWIHLPHISPKVITPYDIFCTQLIIKGRHRSKELFSKDPDYIVVPYTKVQFDLLLQEKEDWPISLLGFLGEVHFHLPKDPLLTFTLQTAIIFPHMTSTTPLEKGIVIFTDGSANGRSVTYIQGREPIIKENTQNTAQQAEIVAVITAFEEVSQPFNLYTDSKYVTGLFPEIETATLSPRTKIYTELKHLQRLIHKRQEKFYIGHIRGHTGLPGPLAQGNAYADSLTRILTA

SEQ ID NO: 412 - protein, 691 aa, synthetic construct; identical to SEQ ID NO: 411

SEQ ID NO: 413 - protein, 691 aa, synthetic construct
WVQEISDSRPMLHIYLNGRRFLGLLNTGADKTCIAGRDWPANWPIHQTESSLQGLGMACGVARSSQPLRWQHEDKSGIIHPFVIPTLPFTLWGRDIMKDIKVRLMTDSPDDSQDLMIGAIESNLFADQISWKSDQPVWLNQWPLKQEKLQALQQLVTEQLQLGHLEESNSPWNTPVFVIKKKSGKWRLLQDLRAVNATMHDMGALQPGLPSPVAPPKGWEIIIIDLQDCFFNIKLHPEDCKRFAFSVPSPNFKRPYQRFQWKVLPQGMKNSPTLCQKFVDKAILTVRDKYQDSYIVHYMDDILLAHPSRSIVDEILTSMIQALNKHGLVVSTEKIQKYDNLKYLGTHIQGDSVSYQKLQIRTDKLRTLNDFQKLLGNINWIRPFLKLTTGELKPLFEILNPDSNPISTRKLTPEACKALQLMNERLSTARVKRLDLSQPWSLCILKTEYTPTACLWQDGVVEWIHLPHISPKVITPYDIFCTQLIIKGRHRSKELFSKDPDYIVVPYTKVQFDLLLQEKEDWPISLLGFLGEVHFHLPKDPLLTFTLQTAIIFPHMTSTTPLEKGIVIFTDGSANGRSVTYIQGREPIIKENTQNTAQQAEIVAVITAFEEVSQPFNLYTDSKYVTGLFPEIETATLSPRTKIYTELKHLQRLIHKRQEKFYIGHIRGHTGLPGPLAQGNAYADSLTRILT

SEQ ID NO: 414 - protein, 691 aa, synthetic construct; identical to SEQ ID NO: 413

SEQ ID NO: 415 - protein, 691 aa, synthetic construct
VQEISDSRPMLHIYLNGRRFLGLLDTGADKTCIAGRDWPANWPIHQTESSLQGLGMACGVARSSQPLRWQHEDKSGIIHPFVIPTLPFTLWGRDIMKDIKVRLMTDSPDDSQDLMIGAIESNLFADQISWKSDQPVWLNQWPLKQEKLQALQQLVTEQLQLGHLEESNSPWNTPVFVIKKKSGKWRLLQDLRAVNATMHDMGALQPGLPSPPAVPKGWEIIIIDLQDCFFNIKLHPEDCKRFAFSVPSPNFKRPYQRFQWKVLPQGMKNSPTLCQKFVDKAILTVRDKYQDSYIVHYMDDILLAHPSRSIVDEILTSMIQALNKHGLVVSTEKIQKYDNLKYLGTHIQGDSVSYQKLQIRTDKLRTLNDFQKLLGNINWIRPFLKLTTGELKPLFEILNPDSNPISTRKLTPEACKALQLMNERLSTARVKRLDLSQPWSLCILKTEYTPTACLWQDGVVEWIHLPHISPKVITPYDIFCTQLIIKGRHRSKELFSKDPDYIVVPYTKVQFDLLLQEKEDWPISLLGFLGEVHFHLPKDPLLTFTLQTAIIFPHMTSTTPLEKGIVIFTDGSANGRSVTYIQGREPIIKENTQNTAQQAEIVAVITAFEEVSQPFNLYTDSKYVTGLFPEIETATLSPRTKIYTELKHLQRLIHKRQEKFYIGHIRGHTGLPGPLAQGNAYADSLTRILTA

SEQ ID NO: 416 - protein, 691 aa, synthetic construct; identical to SEQ ID NO: 415

SEQ ID NO: 417 - protein, 691 aa, synthetic construct
VQEISDSRPMLHIYLNGRRFLGLLDTGADKTCIAGRDWPANWPIHQTESSLQGLGMACGVARSSQPLRWQHEDKSGIIHPFVIPTLPFTLWGRDIMKDIKVRLMTDSPDDSQDLMIGAIESNLFADQISWKSDQPVWLNQWPLKQEKLQALQQLVTEQLQLGHLEESNSPWNTPVFVIKKKSGKWRLLQDLRAVNATMHDMGALQPGLPSPVAVPKGWEIIIIDLQDCFFNIKLHPEDCKRFAFSVPSPNFKRPYQRFQWKVLPQGMKNSPTLCQKFVDKAILTVRDKYQDSYIVHYMDDILLAHPSRSIVDEILTSMIQALNKHGLVVSTEKIQKYDNLKYLGTHIQGDSVSYQKLQIRTDKLRTLNDFQKLLGNINWIRPFLKLTTGELKPLFEILNGDSNPISTRKLTPEACKALQLMNERLSTARVKRLDLSQPWSLCILKTEYTPTACLWQDGVVEWIHLPHISPKVITPYDIFCTQLIIKGRHRSKELFSKDPDYIVVPYTKVQFDLLLQEKEDWPISLLGFLGEVHFHLPKDPLLTFTLQTAIIFPHMTSTTPLEKGIVIFTDGSANGRSVTYIQGREPIIKENTQNTAQQAEIVAVITAFEEVSQPFNLYTDSKYVTGLFPEIETATLSPRTKIYTELKHLQRLIHKRQEKFYIGHIRGHTGLPGPLAQGNAYADSLTRILTA

SEQ ID NO: 418 - protein, 691 aa, synthetic construct; identical to SEQ ID NO: 417

SEQ ID NO: 419 - protein, 599 aa, synthetic construct
GRDIMKDIKVRLMTDSPDDSQDLMIGAIESNLFADQISWKSDQPVWLNQWPLKQEKLQALQQLVTEQLQLGHLEESNSPWNTPVFVIKKKSGKWRLLQDLRAVNATMHDMGALQPGLPSPVAVPKGWEIIIIDLQDCFFNIKLHPEDCKRFAFSVPSPNFKRPYQRFQWKVLPQGMKNSPTLCQKFVDKAILTVRDKYQDSYIVHYMDDILLAHPSRSIVDEILTSMIQALNKHGLVVSTEKIQKYDNLKYLGTHIQGDSVSYQKLQIRTDKLRTLNDFQKLLGNINWIRPFLKLTTGELKPLFEILNGDSNPISTRKLTPEACKALQLMNERLSTARVKRLDLSQPWSLCILKTEYTPTACLWQDGVVEWIHLPHISPKVITPYDIFCTQLIIKGRHRSKELFSKDPDYIVVPYTKVQFDLLLQEKEDWPISLLGFLGEVHFHLPKDPLLTFTLQTAIIFPHMTSTTPLEKGIVIFTDGSANGRSVTYIQGREPIIKENTQNTAQQAEIVAVITAFEEVSQPFNLYTDSKYVTGLFPEIETATLSPRTKIYTELKHLQRLIHKRQEKFYIGHIRGHTGLPGPLAQGNAYADSLTRILT

SEQ ID NO: 420 - protein, 599 aa, synthetic construct; identical to SEQ ID NO: 419

SEQ ID NO: 421 - protein, 599 aa, synthetic construct
GRDIMKDIKVRLMTDSPDDSQDLMIGAIESNLFADQISWKSDQPVWLNQWPLKQEKLQALQQLVTEQLQLGHLEESNSPWNTPVFVIKKKSGKWRLLQDLRAVNATMHDMGALQPGLPSPVAVPKGWEIIIIDLQDCFFNIKLHPEDCKRFAFSVPSPNFKRPYQRFQWKVLPQGMKNSPTLCQKFVDKAILTVRDKYQDSYIVHYMDDILLAHPSRSIVDEILTSMIQALNKHGLVVSTEKIQKYDNLKYLGTHIQGDSVSYQKLQIRTDKLRTLNDFQKLLGNINWIRPFLKLTTGELKPLFEILNPDSNPISTRKLTPEACKALQLMNERLSTARVKRLDLSQPWSLCILKTEYTPTACLWQDGVVEWIHLPHISPKVITPYDIFCTQLIIKGRHRSKELFSKDPDYIVVPYTKVQFDLLLQEKEDWPISLLGFLGEVHFHLPKDPLLTFTLQTAIIFPHMTSTTPLEKGIVIFTDGSANGRSVTYIQGREPIIKENTQNTAQQAEIVAVITAFEEVSQPFNLYTDSKYVTGLFPEIETATLSPRTKIYTELKHLQRLIHKRQEKFYIGHIRGHTGLPGPLAQGNAYADSLTRILT

SEQ ID NO: 422 - protein, 599 aa, synthetic construct; identical to SEQ ID NO: 421

SEQ ID NO: 423 - protein, 599 aa, synthetic construct
GRDIMKDIKVRLMTDSPDDSQDLMIGAIESNLFADQISWKSDQPVWLNQWPLKQEKLQALQQLVTEQLQLGHLEESNSPWNTPVFVIKKKSGKWRLLQDLRAVNATMHDMGALQPGLPSPVAPPKGWEIIIIDLQDCFFNIKLHPEDCKRFAFSVPSPNFKRPYQRFQWKVLPQGMKNSPTLCQKFVDKAILTVRDKYQDSYIVHYMDDILLAHPSRSIVDEILTSMIQALNKHGLVVSTEKIQKYDNLKYLGTHIQGDSVSYQKLQIRTDKLRTLNDFQKLLGNINWIRPFLKLTTGELKPLFEILNPDSNPISTRKLTPEACKALQLMNERLSTARVKRLDLSQPWSLCILKTEYTPTACLWQDGVVEWIHLPHISPKVITPYDIFCTQLIIKGRHRSKELFSKDPDYIVVPYTKVQFDLLLQEKEDWPISLLGFLGEVHFHLPKDPLLTFTLQTAIIFPHMTSTTPLEKGIVIFTDGSANGRSVTYIQGREPIIKENTQNTAQQAEIVAVITAFEEVSQPFNLYTDSKYVTGLFPEIETATLSPRTKIYTELKHLQRLIHKRQEKFYIGHIRGHTGLPGPLAQGNAYADSLTRILT

SEQ ID NO: 424 - protein, 599 aa, synthetic construct; identical to SEQ ID NO: 423

SEQ ID NO: 425 - protein, 585 aa, Mason-Pfizer monkey virus
LTAAIDILAPQQCAEPITWKSDEPVWVDQWPLTNDKLAAAQQLVQEQLEAGHITESSSPWNTPIFVIKKKSGKWRLLQDLRAVNATMVLMGALQPGLPSPVAIPQGYLKIIIDLKDCFFSIPLHPSDQKRFAFSLPSTNFKEPMQRFQWKVLPQGMANSPTLCQKYVATAIHKVRHAWKQMYIIHYMDDILIAGKDGQQVLQCFDQLKQELTAAGLHIAPEKVQLQDPYTYLGFELNGPKITNQKAVIRKDKLQTLNDFQKLLGDINWLRPYLKLTTGDLKPLFDTLKGDSDPNSHRSLSKEALASLEKVETAIAEQFVTHINYSLPLIFLIFNTALTPTGLFWQDNPIMWIHLPASPKKVLLPYYDAIADLIILGRDHSKKYFGIEPSTIIQPYSKSQIDWLMQNTEMWPIACASFVGILDNHYPPNKLIQFCKLHTFVFPQIISKTPLNNALLVFTDGSSTGMAAYTLTDTTIKFQTNLNSAQLVELQALIAVLSAFPNQPLNIYTDSAYLAHSIPLLETVAQIKHISETAKLFLQCQQLIYNRSIPFYIGHVRAHSGLPGPIAQGNQRADLATKIVASNINT

SEQ ID NO: 426 - protein, 585 aa, synthetic construct
LTAAIDILAPQQCAEPITWKSDEPVWVDQWPLTNDKLAAAQQLVQEQLEAGHITESSSPWNTPIFVIKKKSGKWRLLQDLRAVNATMVLMGALQPGLPSPVAPPQGYLKIIIDLKDCFFSIPLHPSDQKRFAFSLPSTNFKEPMQRFQWKVLPQGMANSPTLCQKYVATAIHKVRHAWKQMYIIHYMDDILIAGKDGQQVLQCFDQLKQELTAAGLHIAPEKVQLQDPYTYLGFELNGPKITNQKAVIRKDKLQTLNDFQKLLGDINWLRPYLKLTTGDLKPLFDTLKPDSDPNSHRSLSKEALASLEKVETAIAEQFVTHINYSLPLIFLIFNTALTPTGLFWQDNPIMWIHLPASPKKVLLPYYDAIADLIILGRDHSKKYFGIEPSTIIQPYSKSQIDWLMQNTEMWPIACASFVGILDNHYPPNKLIQFCKLHTFVFPQIISKTPLNNALLVFTDGSSTGMAAYTLTDTTIKFQTNLNSAQLVELQALIAVLSAFPNQPLNIYTDSAYLAHSIPLLETVAQIKHISETAKLFLQCQQLIYNRSIPFYIGHVRAHSGLPGPIAQGNQRADLATKIVASNINT

SEQ ID NO: 427 - protein, 665 aa, unidentified
TLQLDDEYRLYSPLVKPDQNIQFWLEQFPQAWAETAGMGLAKQVPPQVIQLKASATPVSVRQYPLSKEAQEGIRPHVQRLIQQGILVPVQSPWNTPLLPVRKPGTNDYRPVQDLREVNKRVQDIHPTVPNPYNLLCALPPQRSWYTVLDLKDAFFCLRLHPTSQPLFAFEWRDPGTGRTGQLTWTRLPQGFKNSPTIFDEALHRDLANFRIQHPQVTLLQYVDDLLLAGATKQDCLEGTKALLLELSDLGYRASAKKAQICRREVTYLGYSLRDGQRWLTEARKKTVVQIPAPTTAKQVREFLGTAGFCRLWIPGFATLAAPLYPLTKEKGEFSWAPEHQKAFDAIKKALLSAPALALPDVTKPFTLYVDERKGVARGVLTQTLGPWRRPVAYLSKKLDPVASGWPVCLKAIAAVAILVKDADKLTLGQNITVIAPHALENIVRQPPDRWMTNARMTHYQSLLLTERVTFAPPAALNPATLLPEETDEPVTHDCHQLLIEETGVRKDLTDIPLTGEVLTWFTDGSSYVVEGKRMAGAAVVDGTRTIWASSLPEGTSAQKAELMALTQALRLAEGKSINIYTDSRYAFATAHVHGAIYKQRGLLTSAGREIKNKEEILSLLEALHLPKRLAIIHCPGHQKAKDPISRGNQMADRVAKQAAQGVNLL

SEQ ID NO: 428 - protein, 665 aa, unidentified; identical to SEQ ID NO: 427

SEQ ID NO: 429 - protein, 665 aa, synthetic construct
TLQLDDEYRLYSPLVKPDQNIQFWLEQFPQAWAETAGMGLAKQVPPQVIQLKASATPVSVRQYPLSKEAQEGIRPHVQRLIQQGILVPVQSPWNTPLLPVRKPGTNDYRPVQDLREVNKRVQDIHPTVPNPYNLLCALPPQRSWYTVLDLKDAFFCLRLHPTSQPLFAFEWRDPGTGRTGQLTWTRLPQGFKNSPTIFNEALHRDLANFRIQHPQVTLLQYVDDLLLAGATKQDCLEGTKALLLELSDLGYRASAKKAQICRREVTYLGYSLRDGQRWLTEARKKTVVQIPAPTTAKQVREFLGTAGFCRLWIPGFATLAAPLYPLTKPKGEFSWAPEHQKAFDAIKKALLSAPALALPDVTKPFTLYVDERKGVARGVLTQTLGPWRRPVAYLSKKLDPVASGWPVCLKAIAAVAILVKDADKLTLGQNITVIAPHALENIVRQPPDRWMTNARMTHYQSLLLTERVTFAPPAALNPATLLPEETDEPVTHDCHQLLIEETGVRKDLTDIPLTGEVLTWFTDGSSYVVEGKRMAGAAVVDGTRTIWASSLPEGTSAQKAELMALTQALRLAEGKSINIYTDSRYAFATAHVHGAIYKQRGWLTSAGREIKNKEEILSLLEALHLPKRLAIIHCPGHQKAKDPISRGNQMADRVAKQAAQGVNLL

SEQ ID NO: 430 - protein, 665 aa, synthetic construct; identical to SEQ ID NO: 429

SEQ ID NO: 431 - protein, 663 aa, synthetic construct
LDDEYRLYSPLVKPDQNIQFWLEQFPQAWAETAGMGLAKQVPPQVIQLKASATPVSVRQYPLSKEAQEGIRPHVQRLIQQGILVPVQSPWNTPLLPVRKPGTNDYRPVQDLREVNKRVQDIHPTVPNPYNLLCALPPQRSWYTVLDLKDAFFCLRLHPTSQPLFAFEWRDPGTGRTGQLTWTRLPQGFKNSPTIFNEALHRDLANFRIQHPQVTLLQYVDDLLLAGATKQDCLEGTKALLLELSDLGYRASAKKAQICRREVTYLGYSLRDGQRWLTEARKKTVVQIPAPTTAKQVREFLGKAGFCRLFIPGFATLAAPLYPLTKPKGEFSWAPEHQKAFDAIKKALLSAPALALPDVTKPFTLYVDERKGVARGVLTQTLGPWRRPVAYLSKKLDPVASGWPVCLKAIAAVAILVKDADKLTLGQNITVIAPHALENIVRQPPDRWMTNARMTHYQSLLLTERVTFAPPAALNPATLLPEETDEPVTHDCHQLLIEETGVRKDLTDIPLTGEVLTWFTDGSSYVVEGKRMAGAAVVDGTRTIWASSLPEGTSAQKAELMALTQALRLAEGKSINIYTDSRYAFATAHVHGAIYKQRGWLTSAGREIKNKEEILSLLEALHLPKRLAIIHCPGHQKAKDPISRGNQMADRVAKQAAQGVNLLP

SEQ ID NO: 432 - protein, 663 aa, synthetic construct; identical to SEQ ID NO: 431

SEQ ID NO: 433 - protein, 751 aa, unidentified
MDPLQLLQPLEAEIKGTKLKAHWNSGATITCVPEAFLEDERPIQTMLIKTIHGEKQQDVYYLTFKVQGRKVEAEVLASPYDYILLNPSDVPWLMKKPLQLTVLVPLHEYQERLLQQTALPKEQKELLQKLFLKYDALWQHWENQVGHRRIKPHNIATGTLAPRPQKQYPINPKAKPSIQIVIDDLLKQGVLIQQNSTMNTPVYPVPKPDGKWRMVLDYREVNKTIPLIAAQNQHSAGILSSIYRGKYKTTLDLTNGFWAHPITPESYWLTAFTWQGKQYCWTRLPQGFLNSPALFTADVVDLLKEIPNVQAYVDDIYISHDDPQEHLEQLEKIFSILLNAGYVVSLKKSEIAQREVEFLGFNITKEGRGLTDTFKQKLLNITPPKDLKQLQSILGLLNFARNFIPNYSELVKPLYTIVANANGKFISWTEDNSNQLQHIISVLNQADNLEERNPETRLIIKVNSSPSAGYIRYYNEGSKRPIMYVNYIFSKAEAKFTQTEKLLTTMHKGLIKAMDLAMGQEILVYSPIVSMTKIQRTPLPERKALPVRWITWMTYLEDPRIQFHYDKSLPELQQIPNVTEDVIAKTKHPSEFAMVFYTDGSAIKHPDVNKSHSAGMGIAQVQFIPEYKIVHQWSIPLGDHTAQLAEIAAVEFACKKALKISGPVLIVTDSFYVAESANKELPYWKSNGFLNNKKKPLRHVSKWKSIAECLQLKPDIIIMHEKGHQQPMTTLHTEGNNLADKLATQGSYVVH

SEQ ID NO: 434 - protein, 751 aa, synthetic construct
MDPLQLLQPLEAEIKGTKLKAHWNSGATITCVPEAFLEDERPIQTMLIKTIHGEKQQDVYYLTFKVQGRKVEAEVLASPYDYILLNPSDVPWLMKKPLQLTVLVPLHEYQERLLQQTALPKEQKELLQKLFLKYDALWQHWENQVGHRRIKPHNIATGTLAPRPQKQYPINPKAKPSIQIVIDDLLKQGVLIQQNSTMNTPVYPVPKPDGKWRMVLDYREVNKTIPLIAAQNQHSAGILSSIYRGKYKTTLDLTNGFWAHPITPESYWLTAFTWQGKQYCWTRLPQGFLNSPALFNADVVDLLKEIPNVQAYVDDIYISHDDPQEHLEQLEKIFSILLNAGYVVSLKKSEIAQREVEFLGFNITKEGRGLTDTFKQKLLNITPPKDLKQLQSILGLLNFARNFIPNYSELVKPLYTIVAPANGKFISWTEDNSNQLQHIISVLNQADNLEERNPETRLIIKVNSSPSAGYIRYYNEGSKRPIMYVNYIFSKAEAKFTQTEKLLTTMHKGLIKAMDLAMGQEILVYSPIVSMTKIQRTPLPERKALPVRWITWMTYLEDPRIQFHYDKSLPELQQIPNVTEDVIAKTKHPSEFAMVFYTDGSAIKHPDVNKSHSAGMGIAQVQFIPEYKIVHQWSIPLGDHTAQLAEIAAVEFACKKALKISGPVLIVTDSFYVAESANKELPYWKSNGFLNNKKKPLRHVSKWKSIAECLQLKPDIIIMHEKGHQQPMTTLHTEGNNLADKLATQGSYVVH

SEQ ID NO: 435 - protein, 751 aa, synthetic construct
MDPLQLLQPLEAEIKGTKLKAHWNSGATITCVPEAFLEDERPIQTMLIKTIHGEKQQDVYYLTFKVQGRKVEAEVLASPYDYILLNPSDVPWLMKKPLQLTVLVPLHEYQERLLQQTALPKEQKELLQKLFLKYDALWQHWENQVGHRRIKPHNIATGTLAPRPQKQYPINPKAKPSIQIVIDDLLKQGVLIQQNSTMNTPVYPVPKPDGKWRMVLDYREVNKTIPLIAAQNQHSAGILSSIYRGKYKTTLDLTNGFWAHPITPESYWLTAFTWQGKQYCWTRLPQGFLNSPALFNADVVDLLKEIPNVQAYVDDIYISHDDPQEHLEQLEKIFSILLNAGYVVSLKKSEIAQREVEFLGFNITKEGRGLTDTFKQKLLNITPPKDLKQLQSILGKLNFARNFIPNYSELVKPLYTIVAPANGKFISWTEDNSNQLQHIISVLNQADNLEERNPETRLIIKVNSSPSAGYIRYYNEGSKRPIMYVNYIFSKAEAKFTQTEKLLTTMHKGLIKAMDLAMGQEILVYSPIVSMTKIQRTPLPERKALPVRWITWMTYLEDPRIQFHYDKSLPELQQIPNVTEDVIAKTKHPSEFAMVFYTDGSAIKHPDVNKSHSAGMGIAQVQFIPEYKIVHQWSIPLGDHTAQLAEIAAVEFACKKALKISGPVLIVTDSFYVAESANKELPYWKSNGFLNNKKKPLRHVSKWKSIAECLQLKPDIIIMHEKGHQQPMTTLHTEGNNLADKLATQGSYVVH

SEQ ID NO: 436 - protein, 662 aa, synthetic construct
VPWLMKKPLQLTVLVPLHEYQERLLQQTALPKEQKELLQKLFLKYDALWQHWENQVGHRRIKPHNIATGTLAPRPQKQYPINPKAKPSIQIVIDDLLKQGVLIQQNSTMNTPVYPVPKPDGKWRMVLDYREVNKTIPLIAAQNQHSAGILSSIYRGKYKTTLDLTNGFWAHPITPESYWLTAFTWQGKQYCWTRLPQGFLNSPALFTADVVDLLKEIPNVQAYVDDIYISHDDPQEHLEQLEKIFSILLNAGYVVSLKKSEIAQREVEFLGFNITKEGRGLTDTFKQKLLNITPPKDLKQLQSILGLLNFARNFIPNYSELVKPLYTIVANANGKFISWTEDNSNQLQHIISVLNQADNLEERNPETRLIIKVNSSPSAGYIRYYNEGSKRPIMYVNYIFSKAEAKFTQTEKLLTTMHKGLIKAMDLAMGQEILVYSPIVSMTKIQRTPLPERKALPVRWITWMTYLEDPRIQFHYDKSLPELQQIPNVTEDVIAKTKHPSEFAMVFYTDGSAIKHPDVNKSHSAGMGIAQVQFIPEYKIVHQWSIPLGDHTAQLAEIAAVEFACKKALKISGPVLIVTDSFYVAESANKELPYWKSNGFLNNKKKPLRHVSKWKSIAECLQLKPDIIIMHEKGHQQPMTTLHTEGNNLADKLATQGSYVVH

SEQ ID NO: 437 - protein, 662 aa, synthetic construct
VPWLMKKPLQLTVLVPLHEYQERLLQQTALPKEQKELLQKLFLKYDALWQHWENQVGHRRIKPHNIATGTLAPRPQKQYPINPKAKPSIQIVIDDLLKQGVLIQQNSTMNTPVYPVPKPDGKWRMVLDYREVNKTIPLIAAQNQHSAGILSSIYRGKYKTTLDLTNGFWAHPITPESYWLTAFTWQGKQYCWTRLPQGFLNSPALFNADVVDLLKEIPNVQAYVDDIYISHDDPQEHLEQLEKIFSILLNAGYVVSLKKSEIAQREVEFLGFNITKEGRGLTDTFKQKLLNITPPKDLKQLQSILGLLNFARNFIPNYSELVKPLYTIVAPANGKFISWTEDNSNQLQHIISVLNQADNLEERNPETRLIIKVNSSPSAGYIRYYNEGSKRPIMYVNYIFSKAEAKFTQTEKLLTTMHKGLIKAMDLAMGQEILVYSPIVSMTKIQRTPLPERKALPVRWITWMTYLEDPRIQFHYDKSLPELQQIPNVTEDVIAKTKHPSEFAMVFYTDGSAIKHPDVNKSHSAGMGIAQVQFIPEYKIVHQWSIPLGDHTAQLAEIAAVEFACKKALKISGPVLIVTDSFYVAESANKELPYWKSNGFLNNKKKPLRHVSKWKSIAECLQLKPDIIIMHEKGHQQPMTTLHTEGNNLADKLATQGSYVVH

SEQ ID NO: 438 - protein, 662 aa, synthetic construct
VPWLMKKPLQLTVLVPLHEYQERLLQQTALPKEQKELLQKLFLKYDALWQHWENQVGHRRIKPHNIATGTLAPRPQKQYPINPKAKPSIQIVIDDLLKQGVLIQQNSTMNTPVYPVPKPDGKWRMVLDYREVNKTIPLIAAQNQHSAGILSSIYRGKYKTTLDLTNGFWAHPITPESYWLTAFTWQGKQYCWTRLPQGFLNSPALFNADVVDLLKEIPNVQAYVDDIYISHDDPQEHLEQLEKIFSILLNAGYVVSLKKSEIAQREVEFLGFNITKEGRGLTDTFKQKLLNITPPKDLKQLQSILGKLNFARNFIPNYSELVKPLYTIVAPANGKFISWTEDNSNQLQHIISVLNQADNLEERNPETRLIIKVNSSPSAGYIRYYNEGSKRPIMYVNYIFSKAEAKFTQTEKLLTTMHKGLIKAMDLAMGQEILVYSPIVSMTKIQRTPLPERKALPVRWITWMTYLEDPRIQFHYDKSLPELQQIPNVTEDVIAKTKHPSEFAMVFYTDGSAIKHPDVNKSHSAGMGIAQVQFIPEYKIVHQWSIPLGDHTAQLAEIAAVEFACKKALKISGPVLIVTDSFYVAESANKELPYWKSNGFLNNKKKPLRHVSKWKSIAECLQLKPDIIIMHEKGHQQPMTTLHTEGNNLADKLATQGSYVVH

SEQ ID NO: 439 - protein, 751 aa, Simiispumavirus chlaet
MDPLQLLQPLEAEIKGTKLKAHWNSGATITCVPQAFLEEEVPIKNIWIKTIHGEKEQPVYYLTFKIQGRKVEAEVISSPYDYILVSPSDIPWLMKKPLQLTTLVPLQEYEERLLKQTMLTGSYKEKLQSLFLKYDALWQHWENQVGHRRIKPHHIATGTVNPRPQKQYPINPKAKASIQTVINDLLKQGVLIQQNSIMNTPVYPVPKPDGKWRMVLDYREVNKTIPLIAAQNQHSAGILSSIFRGKYKTTLDLSNGFWAHSITPESYWLTAFTWLGQQYCWTRLPQGFLNSPALFTADVVDLLKEVPNVQVYVDDIYISHDDPREHLEQLEKVFSLLLNAGYVVSLKKSEIAQHEVEFLGFNITKEGRGLTETFKQKLLNITPPRDLKQLQSILGLLNFARNFIPNFSELVKPLYNIIATANGKYITWTTDNSQQLQNIISMLNSAENLEERNPEVRLIMKVNTSPSAGYIRFYNEFAKRPIMYLNYVYTKAEVKFTNTEKLLTTIHKGLIKALDLGMGQEILVYSPIVSMTKIQKTPLPERKALPIRWITWMSYLEDPRIQFHYDKTLPELQQVPTVTDDIIAKIKHPSEFSMVFYTDGSAIKHPNVNKSHNAGMGIAQVQFKPEFTVINTWSIPLGDHTAQLAEVAAVEFACKKALKIDGPVLIVTDSFYVAESVNKELPYWQSNGFFNNKKKPLKHVSKWKSIADCIQLKPDIIIIHEKGHQPTASTFHTEGNNLADKLATQGSYVVN

SEQ ID NO: 440 - protein, 751 aa, synthetic construct
MDPLQLLQPLEAEIKGTKLKAHWNSGATITCVPQAFLEEEVPIKNIWIKTIHGEKEQPVYYLTFKIQGRKVEAEVISSPYDYILVSPSDIPWLMKKPLQLTTLVPLQEYEERLLKQTMLTGSYKEKLQSLFLKYDALWQHWENQVGHRRIKPHHIATGTVNPRPQKQYPINPKAKASIQTVINDLLKQGVLIQQNSIMNTPVYPVPKPDGKWRMVLDYREVNKTIPLIAAQNQHSAGILSSIFRGKYKTTLDLSNGFWAHSITPESYWLTAFTWLGQQYCWTRLPQGFLNSPALFNADVVDLLKEVPNVQVYVDDIYISHDDPREHLEQLEKVFSLLLNAGYVVSLKKSEIAQHEVEFLGFNITKEGRGLTETFKQKLLNITPPRDLKQLQSILGLLNFARNFIPNFSELVKPLYNIIATAPGKYITWTTDNSQQLQNIISMLNSAENLEERNPEVRLIMKVNTSPSAGYIRFYNEFAKRPIMYLNYVYTKAEVKFTNTEKLLTTIHKGLIKALDLGMGQEILVYSPIVSMTKIQKTPLPERKALPIRWITWMSYLEDPRIQFHYDKTLPELQQVPTVTDDIIAKIKHPSEFSMVFYTDGSAIKHPNVNKSHNAGMGIAQVQFKPEFTVINTWSIPLGDHTAQLAEVAAVEFACKKALKIDGPVLIVTDSFYVAESVNKELPYWQSNGFFNNKKKPLKHVSKWKSIADCIQLKPDIIIIHEKGHQPTASTFHTEGNNLADKLATQGSYVVN

SEQ ID NO: 441 - protein, 751 aa, synthetic construct
MDPLQLLQPLEAEIKGTKLKAHWNSGATITCVPQAFLEEEVPIKNIWIKTIHGEKEQPVYYLTFKIQGRKVEAEVISSPYDYILVSPSDIPWLMKKPLQLTTLVPLQEYEERLLKQTMLTGSYKEKLQSLFLKYDALWQHWENQVGHRRIKPHHIATGTVNPRPQKQYPINPKAKASIQTVINDLLKQGVLIQQNSIMNTPVYPVPKPDGKWRMVLDYREVNKTIPLIAAQNQHSAGILSSIFRGKYKTTLDLSNGFWAHSITPESYWLTAFTWLGQQYCWTRLPQGFLNSPALFNADVVDLLKEVPNVQVYVDDIYISHDDPREHLEQLEKVFSLLLNAGYVVSLKKSEIAQHEVEFLGFNITKEGRGLTETFKQKLLNITPPRDLKQLQSILGKLNFARNFIPNFSELVKPLYNIIATAPGKYITWTTDNSQQLQNIISMLNSAENLEERNPEVRLIMKVNTSPSAGYIRFYNEFAKRPIMYLNYVYTKAEVKFTNTEKLLTTIHKGLIKALDLGMGQEILVYSPIVSMTKIQKTPLPERKALPIRWITWMSYLEDPRIQFHYDKTLPELQQVPTVTDDIIAKIKHPSEFSMVFYTDGSAIKHPNVNKSHNAGMGIAQVQFKPEFTVINTWSIPLGDHTAQLAEVAAVEFACKKALKIDGPVLIVTDSFYVAESVNKELPYWQSNGFFNNKKKPLKHVSKWKSIADCIQLKPDIIIIHEKGHQPTASTFHTEGNNLADKLATQGSYVVN

SEQ ID NO: 442 - protein, 662 aa, synthetic construct
IPWLMKKPLQLTTLVPLQEYEERLLKQTMLTGSYKEKLQSLFLKYDALWQHWENQVGHRRIKPHHIATGTVNPRPQKQYPINPKAKASIQTVINDLLKQGVLIQQNSIMNTPVYPVPKPDGKWRMVLDYREVNKTIPLIAAQNQHSAGILSSIFRGKYKTTLDLSNGFWAHSITPESYWLTAFTWLGQQYCWTRLPQGFLNSPALFTADVVDLLKEVPNVQVYVDDIYISHDDPREHLEQLEKVFSLLLNAGYVVSLKKSEIAQHEVEFLGFNITKEGRGLTETFKQKLLNITPPRDLKQLQSILGLLNFARNFIPNFSELVKPLYNIIATANGKYITWTTDNSQQLQNIISMLNSAENLEERNPEVRLIMKVNTSPSAGYIRFYNEFAKRPIMYLNYVYTKAEVKFTNTEKLLTTIHKGLIKALDLGMGQEILVYSPIVSMTKIQKTPLPERKALPIRWITWMSYLEDPRIQFHYDKTLPELQQVPTVTDDIIAKIKHPSEFSMVFYTDGSAIKHPNVNKSHNAGMGIAQVQFKPEFTVINTWSIPLGDHTAQLAEVAAVEFACKKALKIDGPVLIVTDSFYVAESVNKELPYWQSNGFFNNKKKPLKHVSKWKSIADCIQLKPDIIIIHEKGHQPTASTFHTEGNNLADKLATQGSYVVN

SEQ ID NO: 443 - protein, 662 aa, synthetic construct
IPWLMKKPLQLTTLVPLQEYEERLLKQTMLTGSYKEKLQSLFLKYDALWQHWENQVGHRRIKPHHIATGTVNPRPQKQYPINPKAKASIQTVINDLLKQGVLIQQNSIMNTPVYPVPKPDGKWRMVLDYREVNKTIPLIAAQNQHSAGILSSIFRGKYKTTLDLSNGFWAHSITPESYWLTAFTWLGQQYCWTRLPQGFLNSPALFNADVVDLLKEVPNVQVYVDDIYISHDDPREHLEQLEKVFSLLLNAGYVVSLKKSEIAQHEVEFLGFNITKEGRGLTETFKQKLLNITPPRDLKQLQSILGLLNFARNFIPNFSELVKPLYNIIATAPGKYITWTTDNSQQLQNIISMLNSAENLEERNPEVRLIMKVNTSPSAGYIRFYNEFAKRPIMYLNYVYTKAEVKFTNTEKLLTTIHKGLIKALDLGMGQEILVYSPIVSMTKIQKTPLPERKALPIRWITWMSYLEDPRIQFHYDKTLPELQQVPTVTDDIIAKIKHPSEFSMVFYTDGSAIKHPNVNKSHNAGMGIAQVQFKPEFTVINTWSIPLGDHTAQLAEVAAVEFACKKALKIDGPVLIVTDSFYVAESVNKELPYWQSNGFFNNKKKPLKHVSKWKSIADCIQLKPDIIIIHEKGHQPTASTFHTEGNNLADKLATQGSYVVN

SEQ ID NO: 444 - protein, 662 aa, synthetic construct
IPWLMKKPLQLTTLVPLQEYEERLLKQTMLTGSYKEKLQSLFLKYDALWQHWENQVGHRRIKPHHIATGTVNPRPQKQYPINPKAKASIQTVINDLLKQGVLIQQNSIMNTPVYPVPKPDGKWRMVLDYREVNKTIPLIAAQNQHSAGILSSIFRGKYKTTLDLSNGFWAHSITPESYWLTAFTWLGQQYCWTRLPQGFLNSPALFNADVVDLLKEVPNVQVYVDDIYISHDDPREHLEQLEKVFSLLLNAGYVVSLKKSEIAQHEVEFLGFNITKEGRGLTETFKQKLLNITPPRDLKQLQSILGKLNFARNFIPNFSELVKPLYNIIATAPGKYITWTTDNSQQLQNIISMLNSAENLEERNPEVRLIMKVNTSPSAGYIRFYNEFAKRPIMYLNYVYTKAEVKFTNTEKLLTTIHKGLIKALDLGMGQEILVYSPIVSMTKIQKTPLPERKALPIRWITWMSYLEDPRIQFHYDKTLPELQQVPTVTDDIIAKIKHPSEFSMVFYTDGSAIKHPNVNKSHNAGMGIAQVQFKPEFTVINTWSIPLGDHTAQLAEVAAVEFACKKALKIDGPVLIVTDSFYVAESVNKELPYWQSNGFFNNKKKPLKHVSKWKSIADCIQLKPDIIIIHEKGHQPTASTFHTEGNNLADKLATQGSYVVN

SEQ ID NO: 445 - protein, 751 aa, Western chimpanzee simian foamy virus
MNPLQLLQPLPAEVKGTKLLAHWNSGATITCIPESFLEDEQPIKQTLIKTIHGEKQQNVYYLTFKVKGRKVEAEVIASPYEYILLSPTDVPWLTQQPLQLTILVPLQEYQDRILNKTALPEEQKQQLKALFTKYDNLWQHWENQVGHRKIRPHNIATGDYPPRPQKQYPINPKAKPSIQIVIDDLLKQGVLTPQNSTMNTPVYPVPKPDGRWRMVLDYREVNKTIPLTAAQNQHSAGILATIVRQKYKTTLDLANGFWAHPITPDSYWLTAFTWQGKQYCWTRLPQGFLNSPALFTADAVDLLKEVPNVQVYVDDIYLSHDNPHEHIQQLEKVFQILLQAGYVVSLKKSEIGQRTVEFLGFNITKEGRGLTDTFKTKLLNVTPPKDLKQLQSILGLLNFARNFIPNFAELVQTLYNLIASSKGKYIEWTEDNTKQLNKVIEALNTASNLEERLPDQRLVIKVNTSPSAGYVRYYNESGKKPIMYLNYVFSKAELKFSMLEKLLTTMHKALIKAMDLAMGQEILVYSPIVSMTKIQKTPLPERKALPIRWITWMTYLEDPRIQFHYDKTLPELKHIPDVYTSSIPPLKHPSQYEGVFCTDGSAIKSPDPTKSNNAGMGIVHAIYNPEYKILNQWSIPLGHHTAQMAEIAAVEFACKKALKVPGPVLVITDSFYVAESANKELPYWKSNGFVNNKKEPLKHISKWKSIAECLSIKPDITIQHEKGHQPINTSIHTEGNALADKLATQGSYVVN

SEQ ID NO: 446 - protein, 751 aa, synthetic construct
MNPLQLLQPLPAEVKGTKLLAHWNSGATITCIPESFLEDEQPIKQTLIKTIHGEKQQNVYYLTFKVKGRKVEAEVIASPYEYILLSPTDVPWLTQQPLQLTILVPLQEYQDRILNKTALPEEQKQQLKALFTKYDNLWQHWENQVGHRKIRPHNIATGDYPPRPQKQYPINPKAKPSIQIVIDDLLKQGVLTPQNSTMNTPVYPVPKPDGRWRMVLDYREVNKTIPLTAAQNQHSAGILATIVRQKYKTTLDLANGFWAHPITPDSYWLTAFTWQGKQYCWTRLPQGFLNSPALFNADAVDLLKEVPNVQVYVDDIYLSHDNPHEHIQQLEKVFQILLQAGYVVSLKKSEIGQRTVEFLGFNITKEGRGLTDTFKTKLLNVTPPKDLKQLQSILGLLNFARNFIPNFAELVQTLYNLIASSPGKYIEWTEDNTKQLNKVIEALNTASNLEERLPDQRLVIKVNTSPSAGYVRYYNESGKKPIMYLNYVFSKAELKFSMLEKLLTTMHKALIKAMDLAMGQEILVYSPIVSMTKIQKTPLPERKALPIRWITWMTYLEDPRIQFHYDKTLPELKHIPDVYTSSIPPLKHPSQYEGVFCTDGSAIKSPDPTKSNNAGMGIVHAIYNPEYKILNQWSIPLGHHTAQMAEIAAVEFACKKALKVPGPVLVITDSFYVAESANKELPYWKSNGFVNNKKEPLKHISKWKSIAECLSIKPDITIQHEKGHQPINTSIHTEGNALADKLATQGSYVVN

SEQ ID NO: 447 - protein, 751 aa, synthetic construct
MNPLQLLQPLPAEVKGTKLLAHWNSGATITCIPESFLEDEQPIKQTLIKTIHGEKQQNVYYLTFKVKGRKVEAEVIASPYEYILLSPTDVPWLTQQPLQLTILVPLQEYQDRILNKTALPEEQKQQLKALFTKYDNLWQHWENQVGHRKIRPHNIATGDYPPRPQKQYPINPKAKPSIQIVIDDLLKQGVLTPQNSTMNTPVYPVPKPDGRWRMVLDYREVNKTIPLTAAQNQHSAGILATIVRQKYKTTLDLANGFWAHPITPDSYWLTAFTWQGKQYCWTRLPQGFLNSPALFNADAVDLLKEVPNVQVYVDDIYLSHDNPHEHIQQLEKVFQILLQAGYVVSLKKSEIGQRTVEFLGFNITKEGRGLTDTFKTKLLNVTPPKDLKQLQSILGKLNFARNFIPNFAELVQTLYNLIASSPGKYIEWTEDNTKQLNKVIEALNTASNLEERLPDQRLVIKVNTSPSAGYVRYYNESGKKPIMYLNYVFSKAELKFSMLEKLLTTMHKALIKAMDLAMGQEILVYSPIVSMTKIQKTPLPERKALPIRWITWMTYLEDPRIQFHYDKTLPELKHIPDVYTSSIPPLKHPSQYEGVFCTDGSAIKSPDPTKSNNAGMGIVHAIYNPEYKILNQWSIPLGHHTAQMAEIAAVEFACKKALKVPGPVLVITDSFYVAESANKELPYWKSNGFVNNKKEPLKHISKWKSIAECLSIKPDITIQHEKGHQPINTSIHTEGNALADKLATQGSYVVN

SEQ ID NO: 448 - protein, 662 aa, synthetic construct
VPWLTQQPLQLTILVPLQEYQDRILNKTALPEEQKQQLKALFTKYDNLWQHWENQVGHRKIRPHNIATGDYPPRPQKQYPINPKAKPSIQIVIDDLLKQGVLTPQNSTMNTPVYPVPKPDGRWRMVLDYREVNKTIPLTAAQNQHSAGILATIVRQKYKTTLDLANGFWAHPITPDSYWLTAFTWQGKQYCWTRLPQGFLNSPALFTADAVDLLKEVPNVQVYVDDIYLSHDNPHEHIQQLEKVFQILLQAGYVVSLKKSEIGQRTVEFLGFNITKEGRGLTDTFKTKLLNVTPPKDLKQLQSILGLLNFARNFIPNFAELVQTLYNLIASSKGKYIEWTEDNTKQLNKVIEALNTASNLEERLPDQRLVIKVNTSPSAGYVRYYNESGKKPIMYLNYVFSKAELKFSMLEKLLTTMHKALIKAMDLAMGQEILVYSPIVSMTKIQKTPLPERKALPIRWITWMTYLEDPRIQFHYDKTLPELKHIPDVYTSSIPPLKHPSQYEGVFCTDGSAIKSPDPTKSNNAGMGIVHAIYNPEYKILNQWSIPLGHHTAQMAEIAAVEFACKKALKVPGPVLVITDSFYVAESANKELPYWKSNGFVNNKKEPLKHISKWKSIAECLSIKPDITIQHEKGHQPINTSIHTEGNALADKLATQGSYVVN

SEQ ID NO: 449 - protein, 662 aa, synthetic construct
VPWLTQQPLQLTILVPLQEYQDRILNKTALPEEQKQQLKALFTKYDNLWQHWENQVGHRKIRPHNIATGDYPPRPQKQYPINPKAKPSIQIVIDDLLKQGVLTPQNSTMNTPVYPVPKPDGRWRMVLDYREVNKTIPLTAAQNQHSAGILATIVRQKYKTTLDLANGFWAHPITPDSYWLTAFTWQGKQYCWTRLPQGFLNSPALFNADAVDLLKEVPNVQVYVDDIYLSHDNPHEHIQQLEKVFQILLQAGYVVSLKKSEIGQRTVEFLGFNITKEGRGLTDTFKTKLLNVTPPKDLKQLQSILGLLNFARNFIPNFAELVQTLYNLIASSPGKYIEWTEDNTKQLNKVIEALNTASNLEERLPDQRLVIKVNTSPSAGYVRYYNESGKKPIMYLNYVFSKAELKFSMLEKLLTTMHKALIKAMDLAMGQEILVYSPIVSMTKIQKTPLPERKALPIRWITWMTYLEDPRIQFHYDKTLPELKHIPDVYTSSIPPLKHPSQYEGVFCTDGSAIKSPDPTKSNNAGMGIVHAIYNPEYKILNQWSIPLGHHTAQMAEIAAVEFACKKALKVPGPVLVITDSFYVAESANKELPYWKSNGFVNNKKEPLKHISKWKSIAECLSIKPDITIQHEKGHQPINTSIHTEGNALADKLATQGSYVVN

SEQ ID NO: 450 - protein, 662 aa, synthetic construct
VPWLTQQPLQLTILVPLQEYQDRILNKTALPEEQKQQLKALFTKYDNLWQHWENQVGHRKIRPHNIATGDYPPRPQKQYPINPKAKPSIQIVIDDLLKQGVLTPQNSTMNTPVYPVPKPDGRWRMVLDYREVNKTIPLTAAQNQHSAGILATIVRQKYKTTLDLANGFWAHPITPDSYWLTAFTWQGKQYCWTRLPQGFLNSPALFNADAVDLLKEVPNVQVYVDDIYLSHDNPHEHIQQLEKVFQILLQAGYVVSLKKSEIGQRTVEFLGFNITKEGRGLTDTFKTKLLNVTPPKDLKQLQSILGKLNFARNFIPNFAELVQTLYNLIASSPGKYIEWTEDNTKQLNKVIEALNTASNLEERLPDQRLVIKVNTSPSAGYVRYYNESGKKPIMYLNYVFSKAELKFSMLEKLLTTMHKALIKAMDLAMGQEILVYSPIVSMTKIQKTPLPERKALPIRWITWMTYLEDPRIQFHYDKTLPELKHIPDVYTSSIPPLKHPSQYEGVFCTDGSAIKSPDPTKSNNAGMGIVHAIYNPEYKILNQWSIPLGHHTAQMAEIAAVEFACKKALKVPGPVLVITDSFYVAESANKELPYWKSNGFVNNKKEPLKHISKWKSIAECLSIKPDITIQHEKGHQPINTSIHTEGNALADKLATQGSYVVN

SEQ ID NO: 451 - protein, 592 aa, Squirrel monkey retrovirus
PRSRAIDIPVPHADKISWKITDPVWVDQWPLTYEKTLAAIALVQEQLAAGHIEPTNSPWNTPIFIIKKKSGSWRLLQDLRAVNKVMVPMGALQPGLPSPVAIPLNYHKIVIDLKDCFFTIPLHPEDRPYFAFSVPQINFQSPMPRYQWKVLPQGMANSPTLCQKFVAAAIAPVRSQWPEAYILHYMDDILLACDSAEAAKACYAHIISCLTSYGLKIAPDKVQVSEPFSYLGFELHHQQVFTPRVCLKTDHLKTLNDFQKLLGDIQWLRPYLKLPTSALVPLNNILKGDPNPLSVRALTPEAKQSLALINKAIQNQSVQQISYNLPLVLLLLPTPHTPTAVFWQPNGTDPTKNGSPLLWLHLPASPSKVLLTYPSLLAMLIIKGRYTGRQLFGRDPHSIIIPYTQDQLTWLLQTSDEWAIALSSFTGDIDNHYPSDPVIQFAKLHQFIFPKITKCAPIPQATLVFTDGSSNGIAAYVIDNQPISIKSPYLSAQLVELYAILQVFTVLAHQPFNLYTDSAYIAQSVPLLETVPFIKSSTNATPLFSKLQQLILNRQHPFFIGHLRAHLNLPGPLAEGNALADAATQIFPIISD

SEQ ID NO: 452 - protein, 592 aa, synthetic construct
PRSRAIDIPVPHADKISWKITDPVWVDQWPLTYEKTLAAIALVQEQLAAGHIEPTNSPWNTPIFIIKKKSGSWRLLQDLRAVNKVMVPMGALQPGLPSPVAIPLNYHKIVIDLKDCFFTIPLHPEDRPYFAFSVPQINFQSPMPRYQWKVLPQGMANSPTLCQKFVAAAIAPVRSQWPEAYILHYMDDILLACDSAEAAKACYAHIISCLTSYGLKIAPDKVQVSEPFSYLGFELHHQQVFTPRVCLKTDHLKTLNDFQKLLGDIQWLRPYLKLPTSALVPLNNILKPDPNPLSVRALTPEAKQSLALINKAIQNQSVQQISYNLPLVLLLLPTPHTPTAVFWQPNGTDPTKNGSPLLWLHLPASPSKVLLTYPSLLAMLIIKGRYTGRQLFGRDPHSIIIPYTQDQLTWLLQTSDEWAIALSSFTGDIDNHYPSDPVIQFAKLHQFIFPKITKCAPIPQATLVFTDGSSNGIAAYVIDNQPISIKSPYLSAQLVELYAILQVFTVLAHQPFNLYTDSAYIAQSVPLLETVPFIKSSTNATPLFSKLQQLILNRQHPFFIGHLRAHLNLPGPLAEGNALADAATQIFPIISD

SEQ ID NO: 453 - protein, 592 aa, synthetic construct
PRSRAIDIPVPHADKISWKITDPVWVDQWPLTYEKTLAAIALVQEQLAAGHIEPTNSPWNTPIFIIKKKSGSWRLLQDLRAVNKVMVPMGALQPGLPSPVAPPLNYHKIVIDLKDCFFTIPLHPEDRPYFAFSVPQINFQSPMPRYQWKVLPQGMANSPTLCQKFVAAAIAPVRSQWPEAYILHYMDDILLACDSAEAAKACYAHIISCLTSYGLKIAPDKVQVSEPFSYLGFELHHQQVFTPRVCLKTDHLKTLNDFQKLLGDIQWLRPYLKLPTSALVPLNNILKPDPNPLSVRALTPEAKQSLALINKAIQNQSVQQISYNLPLVLLLLPTPHTPTAVFWQPNGTDPTKNGSPLLWLHLPASPSKVLLTYPSLLAMLIIKGRYTGRQLFGRDPHSIIIPYTQDQLTWLLQTSDEWAIALSSFTGDIDNHYPSDPVIQFAKLHQFIFPKITKCAPIPQATLVFTDGSSNGIAAYVIDNQPISIKSPYLSAQLVELYAILQVFTVLAHQPFNLYTDSAYIAQSVPLLETVPFIKSSTNATPLFSKLQQLILNRQHPFFIGHLRAHLNLPGPLAEGNALADAATQIFPIISD

SEQ ID NO: 454 - protein, 585 aa, unidentified
LATAVDILAPQRYADPITWKSDEPVWVDQWPLTQEKLAAAQQLVQEQLQAGHIIESNSPWNTPIFVIKKKSGKWRLLQDLRAVNATMVLMGALQPGLPSPVAIPQGYFKIVIDLKDCFFTIPLQPVDQKRFAFSLPSTNFKQPMKRYQWKVLPQGMANSPTLCQKYVAAAIEPVRKSWAQMYIIHYMDDILIAGKLGEQVLQCFAQLKQALTTTGLQIAPEKVQLQDPYTYLGFQINGPKITNQKAVIRRDKLQTLNDFQKLLGDINWLRPYLHLTTGDLKPLFDILKGDSNPNSPRSLSEAALASLQKVETAIAEQFVTQIDYTQPLTFLIFNTTLTPTGLFWQNNPVMWVHLPASPKKVLLPYYDAIADLIILGRDNSKKYFGLEPSTIIQPYSKSQIHWLMQNTETWPIACASYAGNIDNHYPPNKLIQFCKLHAVVFPRIISKTPLDNALLVFTDGSSTGIAAYTFEKTTVRFKTSHTSAQLVELQALIAVLSAFPHRALNVYTDSAYLAHSIPLLETVSHIKHISDTAKFFLQCQQLIYNRSIPFYLGHIRAHSGLPGPLSQGNHITDLATKVVATTLTT

SEQ ID NO: 455 - protein, 585 aa, synthetic construct
LATAVDILAPQRYADPITWKSDEPVWVDQWPLTQEKLAAAQQLVQEQLQAGHIIESNSPWNTPIFVIKKKSGKWRLLQDLRAVNATMVLMGALQPGLPSPVAPPQGYFKIVIDLKDCFFTIPLQPVDQKRFAFSLPSTNFKQPMKRYQWKVLPQGMANSPTLCQKYVAAAIEPVRKSWAQMYIIHYMDDILIAGKLGEQVLQCFAQLKQALTTTGLQIAPEKVQLQDPYTYLGFQINGPKITNQKAVIRRDKLQTLNDFQKLLGDINWLRPYLHLTTGDLKPLFDILKGDSNPNSPRSLSEAALASLQKVETAIAEQFVTQIDYTQPLTFLIFNTTLTPTGLFWQNNPVMWVHLPASPKKVLLPYYDAIADLIILGRDNSKKYFGLEPSTIIQPYSKSQIHWLMQNTETWPIACASYAGNIDNHYPPNKLIQFCKLHAVVFPRIISKTPLDNALLVFTDGSSTGIAAYTFEKTTVRFKTSHTSAQLVELQALIAVLSAFPHRALNVYTDSAYLAHSIPLLETVSHIKHISDTAKFFLQCQQLIYNRSIPFYLGHIRAHSGLPGPLSQGNHITDLATKVVATTLTT

SEQ ID NO: 456 - protein, 650 aa, Walleye dermal sarcoma virus
SCQTKNTLNIDEYLLQFPDQLWASLPTDIGRMLVPPITIKIKDNASLPSIRQYPLPKDKTEGLRPLISSLENQGILIKCHSPCNTPIFPIKKAGRDEYRMIHDLRAINNIVAPLTAVVASPTTVLSNLAPSLHWFTVIDLSNAFFSVPIHKDSQYLFAFTFEGHQYTWTVLPQGFIHSPTLFSQALYQSLHKIKFKISSEICIYMDDVLIASKDRDTNLKDTAVMLQHLASEGHKVSKKKLQLCQQEVVYLGQLLTPEGRKILPDRKVTVSQFQQPTTIRQIRAFLGLVGYCRHWIPEFSIHSKFLEKQLKKDTAEPFQLDDQQVEAFNKLKHAITTAPVLVVPDPAKPFQLYTSHSEHASIAVLTQKHAGRTRPIAFLSSKFDAIESGLPPCLKACASIHRSLTQADSFILGAPLIIYTTHAICTLLQRDRSQLVTASRFSKWEADLLRPELTFVACSAVSPAHLYMQSCENNIPPHDCVLLTHTISRPRPDLSDLPIPDPDMTLFSDGSYTTGRGGAAVVMHRPVTDDFIIIHQQPGGASAQTAELLALAAACHLATDKTVNIYTDSRYAYGVVHDFGHLWMHRGFVTSAGTPIKNHKEIEYLLKQIMKPKQVSVIKIEAHTKGVSMEVRGNAAADEAAKNAVFLVQR

SEQ ID NO: 457 - protein, 650 aa, synthetic construct
SCQTKNTLNIDEYLLQFPDQLWASLPTDIGRMLVPPITIKIKDNASLPSIRQYPLPKDKTEGLRPLISSLENQGILIKCHSPCNTPIFPIKKAGRDEYRMIHDLRAINNIVAPLTAVVASPTTVLSNLAPSLHWFTVIDLSNAFFSVPIHKDSQYLFAFTFEGHQYTWTVLPQGFIHSPTLFNQALYQSLHKIKFKISSEICIYMDDVLIASKDRDTNLKDTAVMLQHLASEGHKVSKKKLQLCQQEVVYLGQLLTPEGRKILPDRKVTVSQFQQPTTIRQIRAFLGLVGYCRHWIPEFSIHSKFLEKQLKPDTAEPFQLDDQQVEAFNKLKHAITTAPVLVVPDPAKPFQLYTSHSEHASIAVLTQKHAGRTRPIAFLSSKFDAIESGLPPCLKACASIHRSLTQADSFILGAPLIIYTTHAICTLLQRDRSQLVTASRFSKWEADLLRPELTFVACSAVSPAHLYMQSCENNIPPHDCVLLTHTISRPRPDLSDLPIPDPDMTLFSDGSYTTGRGGAAVVMHRPVTDDFIIIHQQPGGASAQTAELLALAAACHLATDKTVNIYTDSRYAYGVVHDFGHLWMHRGFVTSAGTPIKNHKEIEYLLKQIMKPKQVSVIKIEAHTKGVSMEVRGNAAADEAAKNAVFLVQR

SEQ ID NO: 458 - protein, 650 aa, synthetic construct
SCQTKNTLNIDEYLLQFPDQLWASLPTDIGRMLVPPITIKIKDNASLPSIRQYPLPKDKTEGLRPLISSLENQGILIKCHSPCNTPIFPIKKAGRDEYRMIHDLRAINNIVAPLTAVVASPTTVLSNLAPSLHWFTVIDLSNAFFSVPIHKDSQYLFAFTFEGHQYTWTVLPQGFIHSPTLFNQALYQSLHKIKFKISSEICIYMDDVLIASKDRDTNLKDTAVMLQHLASEGHKVSKKKLQLCQQEVVYLGQLLTPEGRKILPDRKVTVSQFQQPTTIRQIRAFLGKVGYCRHFIPEFSIHSKFLEKQLKPDTAEPFQLDDQQVEAFNKLKHAITTAPVLVVPDPAKPFQLYTSHSEHASIAVLTQKHAGRTRPIAFLSSKFDAIESGLPPCLKACASIHRSLTQADSFILGAPLIIYTTHAICTLLQRDRSQLVTASRFSKWEADLLRPELTFVACSAVSPAHLYMQSCENNIPPHDCVLLTHTISRPRPDLSDLPIPDPDMTLFSDGSYTTGRGGAAVVMHRPVTDDFIIIHQQPGGASAQTAELLALAAACHLATDKTVNIYTDSRYAYGVVHDFGHLWMHRGFVTSAGTPIKNHKEIEYLLKQIMKPKQVSVIKIEAHTKGVSMEVRGNAAADEAAKNAVFLVQR

SEQ ID NO: 459 - protein, 669 aa, Woolly monkey sarcoma virus
VLNLEEEYRLHEKPVPSSIDPSWLQLFPTVWAERAGMGLANQVPPVVVELRSGASPVAVRQYPMSKEAREGIRPHIQRFLDLGVLVPCQSPWNTPLLPVKKPGTNDYRPVQDLREINKRVQDIHPTVPNPYNLLSSLPPSHTWYSVLDLKDAFFCLKLHPNSQPLFAFEWRDPEKGNTGQLTWTRLPQGFKNSPTLFDEALHRDLAPFRALNPQVVLLQYVDDLLVAAPTYRDCKEGTQKLLQELSKLGYRVSAKKAQLCQKEVTYLGYLLKEGKRWLTPARKATVMKIPPPTTPRQVREFLGTAGFCRLWIPGFASLAAPLYPLTKESIPFIWTEEHQKAFDRIKEALLSAPALALPDLTKPFTLYVDERAGVARGVLTQTLGPWRRPVAYLSKKLDPVASGWPTCLKAVAAVALLLKDADKLTLGQNVTVIASHSLESIVRQPPDRWMTNARMTHYQSLLLNERVSFAPPAVLNPATLLPVESEATPVHRCSEILAEETGTRRDLKDQPLPGVPAWYTDGSSFIAEGKRRAGAAIVDGKRTVWASSLPEGTSAQKAELVALTQALRLAEGKDINIYTDSRYAFATAHIHGAIYKQRGLLTSAGKDIKNKEEILALLEAIHLPKRVAIIHCPGHQKGNDPVATGNRRADEAAKQAALSTRVLAETTKP

SEQ ID NO: 460 - protein, 669 aa, synthetic construct
VLNLEEEYRLHEKPVPSSIDPSWLQLFPTVWAERAGMGLANQVPPVVVELRSGASPVAVRQYPMSKEAREGIRPHIQRFLDLGVLVPCQSPWNTPLLPVKKPGTNDYRPVQDLREINKRVQDIHPTVPNPYNLLSSLPPSHTWYSVLDLKDAFFCLKLHPNSQPLFAFEWRDPEKGNTGQLTWTRLPQGFKNSPTLFNEALHRDLAPFRALNPQVVLLQYVDDLLVAAPTYRDCKEGTQKLLQELSKLGYRVSAKKAQLCQKEVTYLGYLLKEGKRWLTPARKATVMKIPPPTTPRQVREFLGTAGFCRLWIPGFASLAAPLYPLTKPSIPFIWTEEHQKAFDRIKEALLSAPALALPDLTKPFTLYVDERAGVARGVLTQTLGPWRRPVAYLSKKLDPVASGWPTCLKAVAAVALLLKDADKLTLGQNVTVIASHSLESIVRQPPDRWMTNARMTHYQSLLLNERVSFAPPAVLNPATLLPVESEATPVHRCSEILAEETGTRRDLKDQPLPGVPAWYTDGSSFIAEGKRRAGAAIVDGKRTVWASSLPEGTSAQKAELVALTQALRLAEGKDINIYTDSRYAFATAHIHGAIYKQRGWLTSAGKDIKNKEEILALLEAIHLPKRVAIIHCPGHQKGNDPVATGNRRADEAAKQAALSTRVLAETTKP

SEQ ID NO: 461 - protein, 669 aa, synthetic construct
VLNLEEEYRLHEKPVPSSIDPSWLQLFPTVWAERAGMGLANQVPPVVVELRSGASPVAVRQYPMSKEAREGIRPHIQRFLDLGVLVPCQSPWNTPLLPVKKPGTNDYRPVQDLREINKRVQDIHPTVPNPYNLLSSLPPSHTWYSVLDLKDAFFCLKLHPNSQPLFAFEWRDPEKGNTGQLTWTRLPQGFKNSPTLFNEALHRDLAPFRALNPQVVLLQYVDDLLVAAPTYRDCKEGTQKLLQELSKLGYRVSAKKAQLCQKEVTYLGYLLKEGKRWLTPARKATVMKIPPPTTPRQVREFLGKAGFCRLFIPGFASLAAPLYPLTKPSIPFIWTEEHQKAFDRIKEALLSAPALALPDLTKPFTLYVDERAGVARGVLTQTLGPWRRPVAYLSKKLDPVASGWPTCLKAVAAVALLLKDADKLTLGQNVTVIASHSLESIVRQPPDRWMTNARMTHYQSLLLNERVSFAPPAVLNPATLLPVESEATPVHRCSEILAEETGTRRDLKDQPLPGVPAWYTDGSSFIAEGKRRAGAAIVDGKRTVWASSLPEGTSAQKAELVALTQALRLAEGKDINIYTDSRYAFATAHIHGAIYKQRGWLTSAGKDIKNKEEILALLEAIHLPKRVAIIHCPGHQKGNDPVATGNRRADEAAKQAALSTRVLAETTKP

SEQ ID NO: 462 - protein, 671 aa, unidentified
TLNIEDEYRLHETSKEPDVPLGSTWLSDFPQAWAETGGMGLAVRQAPLIIPLKATSTPVSIKQYPMSQEARLGIKPHIQRLLDQGILVPCQSPWNTPLLPVKKPGTNDYRPVQDLREVNKRVEDIHPTVPNPYNLLSGLPPSHQWYTVLDLKDAFFCLRLHPTSQPLFAFEWRDPEMGISGQLTWTRLPQGFKNSPTLFDEALHRDLADFRIQHPDLILLQYVDDLLLAATSEQDCQRGTRALLQTLGNLGYRASAKKAQICQKQVKYLGYLLKEGQRWLTEARKETVMGQPTPKTPRQLREFLGTAGFCRLWIPGFAEMAAPLYPLTKTGTLFNWGPDQQKAYQEIKQALLTAPALGLPDLTKPFELFVDEKQGYAKGVLTQKLGPWRRPVAYLSKKLDPVAAGWPPCLRMVAAIAVLTKDAGKLTMGQPLVILAPHAVEALVKQPPDRWLSNARMTHYQAMLLDTDRVQFGPVVALNPATLLPLPEKEAPHDCLEILAETHGTRPDLTDQPIPDADYTWYTDGSSFLQEGQRRAGAAVTTETEVIWARALPAGTSAQRAELIALTQALKMAEGKKLNVYTDSRYAFATAHVHGEIYRRRGLLTSEGREIKNKNEILALLKALFLPKRLSIIHCPGHQKGNSAEARGNRMADQAAREAAMKAVLETSTLL

SEQ ID NO: 463 - protein, 671 aa, synthetic construct
TLNIEDEYRLHETSKEPDVPLGSTWLSDFPQAWAETGGMGLAVRQAPLIIPLKATSTPVSIKQYPMSQEARLGIKPHIQRLLDQGILVPCQSPWNTPLLPVKKPGTNDYRPVQDLREVNKRVEDIHPTVPNPYNLLSGLPPSHQWYTVLDLKDAFFCLRLHPTSQPLFAFEWRDPEMGISGQLTWTRLPQGFKNSPTLFNEALHRDLADFRIQHPDLILLQYVDDLLLAATSEQDCQRGTRALLQTLGNLGYRASAKKAQICQKQVKYLGYLLKEGQRWLTEARKETVMGQPTPKTPRQLREFLGTAGFCRLWIPGFAEMAAPLYPLTKPGTLFNWGPDQQKAYQEIKQALLTAPALGLPDLTKPFELFVDEKQGYAKGVLTQKLGPWRRPVAYLSKKLDPVAAGWPPCLRMVAAIAVLTKDAGKLTMGQPLVILAPHAVEALVKQPPDRWLSNARMTHYQAMLLDTDRVQFGPVVALNPATLLPLPEKEAPHDCLEILAETHGTRPDLTDQPIPDADYTWYTDGSSFLQEGQRRAGAAVTTETEVIWARALPAGTSAQRAELIALTQALKMAEGKKLNVYTDSRYAFATAHVHGEIYRRRGWLTSEGREIKNKNEILALLKALFLPKRLSIIHCPGHQKGNSAEARGNRMADQAAREAAMKAVLETSTLL

SEQ ID NO: 464 - protein, 671 aa, synthetic construct
TLNIEDEYRLHETSKEPDVPLGSTWLSDFPQAWAETGGMGLAVRQAPLIIPLKATSTPVSIKQYPMSQEARLGIKPHIQRLLDQGILVPCQSPWNTPLLPVKKPGTNDYRPVQDLREVNKRVEDIHPTVPNPYNLLSGLPPSHQWYTVLDLKDAFFCLRLHPTSQPLFAFEWRDPEMGISGQLTWTRLPQGFKNSPTLFNEALHRDLADFRIQHPDLILLQYVDDLLLAATSEQDCQRGTRALLQTLGNLGYRASAKKAQICQKQVKYLGYLLKEGQRWLTEARKETVMGQPTPKTPRQLREFLGKAGFCRLFIPGFAEMAAPLYPLTKPGTLFNWGPDQQKAYQEIKQALLTAPALGLPDLTKPFELFVDEKQGYAKGVLTQKLGPWRRPVAYLSKKLDPVAAGWPPCLRMVAAIAVLTKDAGKLTMGQPLVILAPHAVEALVKQPPDRWLSNARMTHYQAMLLDTDRVQFGPVVALNPATLLPLPEKEAPHDCLEILAETHGTRPDLTDQPIPDADYTWYTDGSSFLQEGQRRAGAAVTTETEVIWARALPAGTSAQRAELIALTQALKMAEGKKLNVYTDSRYAFATAHVHGEIYRRRGWLTSEGREIKNKNEILALLKALFLPKRLSIIHCPGHQKGNSAEARGNRMADQAAREAAMKAVLETSTLL

SEQ ID NO: 465 - protein, 427 aa, synthetic construct
MDTSNLMEQILSSDNLNRAYLQVVRNKGAEGVDGMKYTELKEHLAKNGETIKGQLRTRKYKPQPARRVEIPKPDGGVRNLGVPTVTDRFIQQAIAQVLTPIYEEQFHDHSYGFRPNRCAQQAILTALNIMNDGNDWIVDIDLEKFFDTVNHDKLMTLIGRTIKDGDVISIVRKYLVSGIMIDDEYEDSIVGTPQGGNLSPLLANIMLNELDKEMEKRGLNFVRYADDCIIMVGSEMSANRVMRNISRFIEEKLGLKVNMTKSKVDRPSGLKYLGFGFYFDPRAHQFKAKPHAKSVAKFKKRMKELTCRSWGVSNSYKVEKLNQLIRGWINYFKIGSMKTLCKELDSRIRYRLRMCIWKQWKTPQNQEKNLVKLGIDRNTARRVAYTGKRIAYVCNKGAVNVAISNKRLASFGLISMLDYYIEKCVTC

SEQ ID NO: 466 - protein, 420 aa, synthetic construct
MALLERILADRNLITALKRVEANQGAPGIGDVSTDQLRDIYRAHWSTIRAQLLAGTYRPAPVRRVGIPKGPGGTRQLGITPVVDRLIQQIALQELTPIFDPDFSPSSFGFRPGRNAHDAVRQAQGYIQEYGRYVVDMDLKEFFDRVNHDLIMSRVARKVDKKRVLKLIRYALQAGVMIEGVKVQTEEGTQPGGPLSPLLANILLDDLDKELEKRGLKFCYRADDCNIYVSKLRAGQRVKQSIQRFLEKTLKLKVNEEKSVADRPWKRAFGLFSFTPERKARIRLAPRSIQRLKQRIRQLTNPNWSISMPREIHRVNQYVGMWIGYFRLVTEPSVLQTIEGWIRRRLRLCWQLQWKRVRTRIRELRALGLKETAVMEIANRTKGAWRTTKPQTLHQALGKYTWTAQGLKTSLQRYFELRQG

SEQ ID NO: 467 - protein, 599 aa, synthetic construct
MKPTMAILERISKNSQENIDEVFTRLYRYLLRPDIYYVAYQNLYSNKGASTKGILDDTADGFSEEKIKKIIQSLKDGTYYPQPVRRMYIAKKNSKKMRPLGIPTFTDKLIQEAVRIILESIYEPVFEDVSHGFRPQRSCHTALKTIKREFGGARWFVEGDIKGCFDNIDHVTLIGLINLKIKDMKMSQLIYKFLKAGYLENWQYHKTYSGTPQGGILSPLLANIYLHELDKFVLQLKMKFDRESPERITPEYRELHNEIKRISHRLKKLEGEEKAKVLLEYQEKRKRLPTLPCTSQTNKVLKYVRYADDFIISVKGSKEDCQWIKEQLKLFIHNKLKMELSEEKTLITHSSQPARFLGYDIRVRRSGTIKRSGKVKKRTLNGSVELLIPLQDKIRQFIFDKKIAIQKKDSSWFPVHRKYLIRSTDLEIITIYNSELRGICNYYGLASNFNQLNYFAYLMEYSCLKTIASKHKGTLSKTISMFKDGSGSWGIPYEIKQGKQRRYFANFSECKSPYQFTDEISQAPVLYGYARNTLENRLKAKCCELCGTSDENTSYEIHHVNKVKNLKGKEKWEMAMIAKQRKTLVVCFHCHRHVIHKHK

SEQ ID NO: 468 - protein, 1114 aa, synthetic construct
MMASTALSLMGRCNPDGCTRGKHVTAAPMDGPRGPSSLAGTFGWGLAIPAGEPCGRVCSPATVGFFPVAKKSNKENRPEASGLPLESERTGDNPTVRGSAGADPVGQDAPGWTCQFCERTFSTNRGLGVHKRRAHPVETNTDAAPMMVKRRWHGEEIDLLARTEARLLAERGQCSGGDLFGALPGFGRTLEAIKGQRRREPYRALVQAHLARFGSQPGPSSGGCSAEPDFRRASGAEEAGEERCAEDAAAYDPSAVGQMSPDAARVLSELLEGAGRRRACRAMRPKTAGRRNDLHDDRTASAHKTSRQKRRAEYARVQELYKKCRSRAAAEVIDGACGGVGHSLEEMETYWRPILERVSDAPGPTPEALHALGRAEWHGGNRDYTQLWKPISVEEIKASRFDWRTSPGPDGIRSGQWRAVPVHLKAEMFNAWMARGEIPEILRQCRTVFVPKVERPGGPGEYRPISIASIPLRHFHSILARRLLACCPPDARQRGFICADGTLENSAVLDAVLGDSRKKLRECHVAVLDFAKAFDTVSHEALVELLRLRGMPEQFCGYIAHLYDTASTTLAVNNEMSSPVKVGRGVRQGDPLSPILFNVVMDLILASLPERVGYRLEMELVSALAYADDLVLLAGSKVGMQESISAVDCVGRQMGLRLNCRKSAVLSMIPDGHRKKHHYLTERTFNIGGKPLRQVSCVERWRYLGVDFEASGCVTLEHSISSALNNISRAPLKPQQRLEILRAHLIPRFQHGFVLGNISDDRLRMLDVQIRKAVGQWLRLPADVPKAYYHAAVQDGGLAIPSVRATIPDLIVRRFGGLDSSPWSVARAAAKSDKIRKKLRWAWKQLRRFSRVDSTTQRPSVRLFWREHLHASVDGRELRESTRTPTSTKWIRERCAQITGRDFVQFVHTHINALPSRIRGSRGRRGGGESSLTCRAGCKVRETTAHILQQCHRTHGGRILRHNKIVSFVAKAMEENKWTVELEPRLRTSVGLRKPDIIASRDGVGVIVDVQVVSGQRSLDELHREKRNKYGNHGELVELVAGRLGLPKAECVRATSCTISWRGVWSLTSYKELRSIIGLREPTLQIVPILALRGSHMNWTRFNQMTSVMGGGVG

SEQ ID NO: 469 - protein, 1275 aa, synthetic construct
MTGSNSHITILTLNVNGLNSPIKRHRLASWIKSQDPSVCCIQETHLTCRDTHRLKIKGWRKIYQANGKQKKAGVAILVSDKTDFKPTKIKRDKEGHYIMVKGSIQQEELTILNIYAPNTGAPRFIKQVLSDLQRDLDSHTLIMGDFNTPLSILDRSTRQKVNKDTQELNSALHQTDLIDIYRTLHPKSTEYTFFSAPHHTYSKIDHIVGSKALLSKCKRTEIITNYLSDHSAIKLELRIKNLTQSRSTTWKLNNLLLNDYWVHNEMKAEIKMFFETNENKDTTYQNLWDAFKAVCRGKFIALNAYKRKQERSKIDTLTSQLKELEKQEQTHSKASRRQEITKIRAELKEIETQKTLQKINESRSWFFERINKIDRPLARLIKKKREKNQIDTIKNDKGDITTDPTEIQTTIREYYKHLYANKLENLEEMDTFLDTYTLPRLNQEEVESLNRPITGSEIVAIINSLPTKKSPGPDGFTAEFYQRYKEELVPFLLKLFQSIEKEGILPNSFYEASIILIPKPGRDTTKKENFRPISLMNIDAKILNKILANRIQQHIKKLIHHDQVGFIPGMQGWFNIRKSINVIQHINRAKDKNHVIISIDAEKAFDKIQQPFMLKTLNKLGIDGMYLKIIRAIYDKPTANIILNGQKLEAFPLKTGTRQGCPLSPLLFNIVLEVLARAIRQEKEIKGIQLGKEEVKLSLFADDMIVYLENPIVSAQNLLKLISNFSKVSGYKINVQKSQAFLYNNNRQTESQIMGELPFTIASKRIKYLGIQLTRDVKDLFKENYKPLLKEIKEDTNKWKNIPCSWVGRINIVKMAILPKVIYRFNAIPIKLPMTFFTELEKTTLKFIWNQKRARIAKSILSQKNKAGGITLPDFKLYYKATVTKTAWYWYQNRDIDQWNRTEPSEIMPHIYNYLIFDKPEKNKQWGKDSLLNKWCWENWLAICRKLKLDPFLTPYTKINSRWIKDLNVKPKTIKTLEENLGITIQDIGVGKDFMSKTPKAMATKDKIDKWDLIKLKSFCTAKETTIRVNRQPTTWEKIFATYSSDKGLISRIYNELKQIYKKKTNNPIKKWAKDMNRHFSKEDIYAAKKHMKKCSSSLAIREMQIKTTMRYHLTPVRMAIIKKSGNNRCWRGCGEIGTLVHCWWDCKLVQPLWKSVWRFLRDLELEIPFDPAIPLLGIYPKDYKSCCYKDTCTRMFIAALFTIAKTWNQPNCPTMIDWIKKMWHIYTMEYYAAIKNDEFISFVGTWMKLETIILSKLSQEQKTKHRIFSLIGGN

SEQ ID NO: 470 - protein, 1275 aa, synthetic construct; identical to SEQ ID NO: 469

SEQ ID NO: 471 - protein, 538 aa, synthetic construct
AVKAVKSIKPIRTTLRYDEAITYNKDIKEKEKYIEAYHKEVNQLLKMKTWDTDEYYDRKEIDPKRVINSMFIFNKKRDGTHKARFVARGDIQHPDTYDSGMQSNTVHHYALMTSLSLALDNNYYITQLDISSAYLYADIKEELYIRPPPHLGMNDKLIRLKKSLYGLKQSGANWYETIKSYLIQQCGMEEVRGWSCVFKNSQVTICLFVDDMVLFSKNLNSNKRIIEKLKMQYDTKIINLGESDEEIQYDILGLEIKYQRGKYMKLGMENSLTEKIPKLNVPLNPKGRKLSAPGQPGLYIDQDELEIDEDEYKEKVHEMQKLIGLASYVGYKFRFDLLYYINTLAQHILFPSRQVLDMTYELIQFMWDTRDKQLIWHKNKPTEPDNKLVAISDASYGNQPYYKSQIGNIYLLNGKVIGGKSTKASLTCTSTTEAEIHAISESVPLLNNLSYLIQELNKKPIIKGLLTDSRSTISIIKSTNEEKFRNRFFGTKAMRLRDEVSGNNLYVYYIETKKNIADVMTKPLPIKTFKLLTNKWIH

SEQ ID NO: 472 - protein, 328 aa, synthetic construct
MGKRHRNLIDQITTWENLLDAYRKTSHGKRRTWGYLEFKEYDLANLLALQAELKAGNYERGPYREFLVYEPKPRLISALEFKDRLVQHALCNIVAPIFEAGLLPYTYACRPDKGTHAGVCHVQAELRRTRATHFLKSDFSKFFPSIDRAALYAMIDKKIHCAATRRLLRVVLPDEGVGIPIGSLTSQLFANVYGGAVDRLLHDELKQRHWARYMDDIVVLGDDPEELRAVFYRLRDFASERLGLKISHWQVAPVSRGINFLGYRIWPTHKLLRKSSVKRAKRKVANFIKHGEDESLQRFLASWSGHAQWADTHNLFTWMEEQYGIACH

SEQ ID NO: 473 - protein, 320 aa, synthetic construct
MKSAEYLNTFRLRNLGLPVMNNLHDMSKATRISVETLRLLIYTADFRYRIYTVEKKGPEKRMRTIYQPSRELKALQGWVLRNILDKLSSSPFSIGFEKHQSILNNATPHIGANFILNIDLEDFFPSLTANKVFGVFHSLGYNRLISSVLTKICCYKNLLPQGAPSSPKLANLICSKLDYRIQGYAGSRGLIYTRYADDLTLSAQSMKKVVKARDFLFSIIPSEGLVINSKKTCISGPRSQRKVTGLVISQEKVGIGREKYKEIRAKIHHIFCGKSSEIEHVRGWLSFILSVDSKSHRRLITYISKLEKKYGKNPLNKAKT

SEQ ID NO: 474 - protein, 1132 aa, synthetic construct
MPRAPRCRAVRSLLRSHYREVLPLATFVRRLGPQGWRLVQRGDPAAFRALVAQCLVCVPWDARPPPAAPSFRQVSCLKELVARVLQRLCERGAKNVLAFGFALLDGARGGPPEAFTTSVRSYLPNTVTDALRGSGAWGLLLRRVGDDVLVHLLARCALFVLVAPSCAYQVCGPPLYQLGAATQARPPPHASGPRRRLGCERAWNHSVREAGVPLGLPAPGARRRGGSASRSLPLPKRPRRGAAPEPERTPVGQGSWAHPGRTRGPSDRGFCVVSPARPAEEATSLEGALSGTRHSHPSVGRQHHAGPPSTSRPPRPWDTPCPPVYAETKHFLYSSGDKEQLRPSFLLSSLRPSLTGARRLVETIFLGSRPWMPGTPRRLPRLPQRYWQMRPLFLELLGNHAQCPYGVLLKTHCPLRAAVTPAAGVCAREKPQGSVAAPEEEDTDPRRLVQLLRQHSSPWQVYGFVRACLRRLVPPGLWGSRHNERRFLRNTKKFISLGKHAKLSLQELTWKMSVRDCAWLRRSPGVGCVPAAEHRLREEILAKFLHWLMSVYVVELLRSFFYVTETTFQKNRLFFYRKSVWSKLQSIGIRQHLKRVQLRELSEAEVRQHREARPALLTSRLRFIPKPDGLRPIVNMDYVVGARTFRREKRAERLTSRVKALFSVLNYERARRPGLLGASVLGLDDIHRAWRTFVLRVRAQDPPPELYFVKVDVTGAYDTIPQDRLTEVIASIIKPQNTYCVRRYAVVQKAAHGHVRKAFKSHVSTLTDLQPYMRQFVAHLQETSPLRDAVVIEQSSSLNEASSGLFDVFLRFMCHHAVRIRGKSYVQCQGIPQGSILSTLLCSLCYGDMENKLFAGIRRDGLLLRLVDDFLLVTPHLTHAKTFLRTLVRGVPEYGCVVNLRKTVVNFPVEDEALGGTAFVQMPAHGLFPWCGLLLDTRTLEVQSDYSSYARTSIRASLTFNRGFKAGRNMRRKLFGVLRLKCHSLFLDLQVNSLQTVCTNIYKILLLQAYRFHACVLQLPFHQQVWKNPTFFLRVISDTASLCYSILKAKNAGMSLGAKGAAGPLPSEAVQWLCHQAFLLKLTRHRVTYVPLLGSLRTAQTQLSRKLPGTTLTALEAAANPALPSDFKTILD

SEQ ID NO: 475 - protein, 710 aa, synthetic construct
MPNHRLPNCVSYLGENHELSWLHGMFGLLKRSNPQTGGILGWLNTGPNGFVKYMMNLMGHARDKGDAKEYWRLGRSLMKNEAFQVQAFNHVCKHWYLDYKPHKIAKLLKEVREMVEIQPVCIDYKRVYIPKANGKQRPLGVPTVPWRVYLHMWNVLLVWYRIPEQDNQHAYFPKRGVFTAWRALWPKLDSQNIYEFDLKNFFPSVDLAYLKDKLMESGIPQDISEYLTVLNRSLVVLTSEDKIPEPHRDVIFNSDGTPNPNLPKDVQGRILKDPDFVEILRRRGFTDIATNGVPQGASTSCGLATYNVKELFKRYDELIMYADDGILCRQDPSTPDFSVEEAGVVQEPAKSGWIKQNGEFKKSVKFLGLEFIPANIPPLGEGEVKDYPRLRGATRNGSKMELSTELQFLCYLSYKLRIKVLRDLYIQVLGYLPSVPLLRYRSLAEAINELSPKRITIGQFITSSFEEFTAWSPLKRMGFFFSSPAGPTILSSIFNNSTNLQEPSDSRLLYRKGSWVNIRFAAYLYSKLSEEKHGLVPKFLEKLREINFALDKVDVTEIDSKLSRLMKFSVSAAYDEVGTLALKSLFKFRNSERESIKASFKQLRENGKIAEFSEARRLWFEILKLIRLDLFNASSLACDDLLSHLQDRRSIKKWGSSDVLYLKSQRLMRTNKKQLQLDFEKKKNSLKKKLIKRRAKELRDTFKGKENKEA

SEQ ID NO: 476 - protein, 785 aa, synthetic construct
MILDTDYITEDGKPVIRIFKKENGEFKIEYDRTFEPYLYALLKDDSAIEEVKKITAERHGTVVTVKRVEKVQKKFLGRPVEVWKLYFTHPQDVPAIMDKIREHPAVIDIYEYDIPFAIRYLIDKGLVPMEGDEELKLLAFDIETLYHEGEEFAEGPILMISYADEEGARVITWKNVDLPYVDVVSTEREMIKRFLRVVKEKDPDVLITYNGDNFDFAYLKKRCEKLGINFALGRDGSEPKIQRMGDRFAVEVKGRIHFDLYPVIRRTINLPTYTLEAVYEAVFGQPKEKVYAEEITTAWETGENLERVARYSMEDAKVTYELGKEFLPMEAQLSRLIGQSLWDVSRSSTGNLVEWFLLRKAYERNELAPNKPDEKELARRHQSHEGGYIKEPERGLWENIVYLDFRSLYPSIIITHNVSPDTLNREGCKEYDVAPQVGHRFCKDFPGFIPSLLGDLLEERQKIKKRMKATIDPIERKLLDYRQRAIKILANSLYGYYGYARARWYCKECAESVIAWGREYLTMTIKEIEEKYGFKVIYSDTDGFFATIPGADAETVKKKAMEFLKYINAKLPGALELEYEGFYKRGLFVTKKKYAVIDEEGKITTRGLEIVRRDWSEIAKETQARVLEALLKDGDVEKAVRIVKEVTEKLSKYEVPPEKLVIHKQITRDLKDYKATGPHVAVAKRLAARGVKIRPGTVISYIVLKGSGRIVDRAIPFDEFDPTKHKYDAEYYIEKQVLPAVERILRAFGYRKEDLRYQKTRQVGLSARLKPKGTLEGSSHHHHHH

SEQ ID NO: 477 - protein, 208 aa, Petromyzon marinus
MTDAEYVRIHEKLDIYTFKKQFFNNKKSVSHRCYVLFELKRRGERRACFWGYAVNKPQSGTERGIHAEIFSIRKVEEYLRDNPGQFTINWYSSWSPCADCAEKILEWYNQELRGNGHTLKIWACKLYYEKNARNQIGLWNLRDNGVGLNVMVSEHYQCCRKIFIQSSHNQLNENRWLEKTLKRAEKRRSELSIMIQVKILHTTKSPAV

SEQ ID NO: 478 - protein, 198 aa, Homo sapiens [sequence omitted]

SEQ ID NO: 479 - protein, 198 aa, Mus sp.
MDSLLMKQKKFLYHFKNVRWAKGRHETYLCYVVKRRDSATSCSLDFGHLRNKSGCHVELLFLRYISDWDLDPGRCYRVTWFTSWSPCYDCARHVAEFLRWNPNLSLRIFTARLYFCEDRKAEPEGLRRLHRAGVQIGIMTFKDYFYCWNTFVENRERTFKAWEGLHENSVRLTRQLRRILLPLYEVDDLRDAFRMLGF

SEQ ID NO: 480 - protein, 198 aa, Canis sp.
MDSLLMKQRKFLYHFKNVRWAKGRHETYLCYVVKRRDSATSFSLDFGHLRNKSGCHVELLFLRYISDWDLDPGRCYRVTWFTSWSPCYDCARHVADFLRGYPNLSLRIFAARLYFCEDRKAEPEGLRRLHRAGVQIAIMTFKDYFYCWNTFVENREKTFKAWEGLHENSVRLSRQLRRILLPLYEVDDLRDAFRTLGL

SEQ ID NO: 481 - protein, 199 aa, Bos sp.
MDSLLKKQRQFLYQFKNVRWAKGRHETYLCYVVKRRDSPTSFSLDFGHLRNKAGCHVELLFLRYISDWDLDPGRCYRVTWFTSWSPCYDCARHVADFLRGYPNLSLRIFTARLYFCDKERKAEPEGLRRLHRAGVQIAIMTFKDYFYCWNTFVENHERTFKAWEGLHENSVRLSRQLRRILLPLYEVDDLRDAFRTLGL

SEQ ID NO: 482 - protein, 239 aa, Rattus sp.
MAVGSKPKAALVGPHWERERIWCFLCSTGLGTQQTGQTSRWLRPAATQDPVSPPRSLLMKQRKFLYHFKNVRWAKGRHETYLCYVVKRRDSATSFSLDFGYLRNKSGCHVELLFLRYISDWDLDPGRCYRVTWFTSWSPCYDCARHVADFLRGNPNLSLRIFTARLTGWGALPAGLMSPARPSDYFYCWNTFVENHERTFKAWEGLHENSVRLSRRLRRILLPLYEVDDLRDAFRTLGL

SEQ ID NO: 483 - protein, 198 aa, Canis lupus; identical to SEQ ID NO: 480

SEQ ID NO: 484 - protein, 199 aa, Bos taurus; identical to SEQ ID NO: 481

SEQ ID NO: 485 - protein, 198 aa, Mus musculus [sequence omitted]

SEQ ID NO: 486 - protein, 229 aa, Rattus norvegicus [sequence omitted]

SEQ ID NO: 487 - protein, 229 aa, Mesocricetus auratus
MSSETGPVVVDPTLRRRIEPHEFDAFFDQGELRKETCLLYEIRWGGRHNIWRHTGQNTSRHVEINFIEKFTSERYFYPSTRCSIVWFLSWSPCGECSKAITEFLSGHPNVTLFIYAARLYHHTDQRNRQGLRDLISRGVTIRIMTEQEYCYCWRNFVNYPPSNEVYWPRYPNLWMRLYALELYCIHLGLPPCLKIKRRHQYPLTFFRLNLQSCHYQRIPPHILWATGFI

SEQ ID NO: 488 - protein, 236 aa, Pongo pygmaeus
MTSEKGPSTGDPTLRRRIESWEFDVFYDPRELRKETCLLYEIKWGMSRKIWRSSGKNTTNHVEVNFIKKFTSERRFHSSISCSITWFLSWSPCWECSQAIREFLSQHPGVTLVIYVARLFWHMDQRNRQGLRDLVNSGVTIQIMRASEYYHCWRNFVNYPPGDEAHWPQYPPLWMMLYALELHCIILSLPPCLKISRRWQNHLAFFRLHLQNCHYQTIPPHILLATGLIHPSVTWR

SEQ ID NO: 489 - protein, 236 aa, Oryctolagus cuniculus
MASEKGPSNKDYTLRRRIEPWEFEVFFDPQELRKEACLLYEIKWGASSKTWRSSGKNTTNHVEVNFLEKLTSEGRLGPSTCCSITWFLSWSPCWECSMAIREFLSQHPGVTLIIFVARLFQHMDRRNRQGLKDLVTSGVTVRVMSVSEYCYCWENFVNYPPGKAAQWPRYPPRWMLMYALELYCIILGLPPCLKISRRHQKQLTFFSLTPQYCHYKMIPPYILLATGLLQPSVPWR

SEQ ID NO: 490 - protein, 235 aa, Monodelphis domestica
MNSKTGPSVGDATLRRRIKPWEFVAFFNPQELRKETCLLYEIKWGNQNIWRHSNQNTSQHAEINFMEKFTAERHFNSSVRCSITWFLSWSPCWECSKAIRKFLDHYPNVTLAIFISRLYWHMDQQHRQGLKELVHSGVTIQIMSYSEYHYCWRNFVDYPQGEEDYWPKYPYLWIMLYVLELHCIILGLPPCLKISGSHSNQLALFSLDLQDCHYQKIPYNVLVATGLVQPFVTWR

SEQ ID NO: 491 - protein, 224 aa, Pongo pygmaeus
MAQKEEAAAATEAASQNGEDLENLDDPEKLKELIELPPFEIVTGERLPANFFKFQFRNVEYSSGRNKTFLCYVVEAQGKGGQVQASRGYLEDEHAAAHAEEAFFNTILPAFDPALRYNVTWYVSSSPCAACADRIIKTLSKTKNLRLLILVGRLFMWEELEIQDALKKLKEAGCKLRIMKPQDFEYVWQNFVEQEEGESKAFQPWEDIQENFLYYEEKLADILK

SEQ ID NO: 492 - protein, 224 aa, Bos taurus
MAQKEEAAAAAEPASQNGEEVENLEDPEKLKELIELPPFEIVTGERLPAHYFKFQFRNVEYSSGRNKTFLCYVVEAQSKGGQVQASRGYLEDEHATNHAEEAFFNSIMPTFDPALRYMVTWYVSSSPCAACADRIVKTLNKTKNLRLLILVGRLFMWEEPEIQAALRKLKEAGCRLRIMKPQDFEYIWQNFVEQEEGESKAFEPWEDIQENFLYYEEKLADILK

SEQ ID NO: 493 - protein, 440 aa, Mus musculus
MQPQRLGPRAGMGPFCLGCSHRKCYSPIRNLISQETFKFHFKNLGYAKGRKDTFLCYEVTRKDCDSPVSLHHGVFKNKDNIHAEICFLYWFHDKVLKVLSPREEFKITWYMSWSPCFECAEQIVRFLATHHNLSLDIFSSRLYNVQDPETQQNLCRLVQEGAQVAAMDLYEFKKCWKKFVDNGGRRFRPWKRLLTNFRYQDSKLQEILRPCYISVPSSSSSTLSNICLTKGLPETRFWVEGRRMDPLSEEEFYSQFYNQRVKHLCYYHRMKPYLCYQLEQFNGQAPLKGCLLSEKGKQHAEILFLDKIRSMELSQVTITCYLTWSPCPNCAWQLAAFKRDRPDLILHIYTSRLYFHWKRPFQKGLCSLWQSGILVDVMDLPQFTDCWTNFVNPKRPFWPWKGLEIISRRTQRRLRRIKESWGLQDLVNDFGNLQLGPPMS

SEQ ID NO: 494 - protein, 429 aa, Mus sp.
MGPFCLGCSHRKCYSPIRNLISQETFKFHFKNLGYAKGRKDTFLCYEVTRKDCDSPVSLHHGVFKNKDNIHAEICFLYWFHDKVLKVLSPREEFKITWYMSWSPCFECAEQIVRFLATHHNLSLDIFSSRLYNVQDPETQQNLCRLVQEGAQVAAMDLYEFKKCWKKFVDNGGRRFRPWKRLLTNFRYQDSKLQEILRPCYIPVPSSSSSTLSNICLTKGLPETRFCVEGRRMDPLSEEEFYSQFYNQRVKHLCYYHRMKPYLCYQLEQFNGQAPLKGCLLSEKGKQHAEILFLDKIRSMELSQVTITCYLTWSPCPNCAWQLAAFKRDRPDLILHIYTSRLYFHWKRPFQKGLCSLWQSGILVDVMDLPQFTDCWTNFVNPKRPFWPWKGLEIISRRTQRRLRRIKESWGLQDLVNDFGNLQLGPPMS

SEQ ID NO: 495 - protein, 430 aa, Rattus sp.
MGPFCLGCSHRKCYSPIRNLISQETFKFHFKNRLRYAIDRKDTFLCYEVTRKDCDSPVSLHHGVFKNKDNIHAEICFLYWFHDKVLKVLSPREEFKITWYMSWSPCFECAEQVLRFLATHHNLSLDIFSSRLYNIRDPENQQNLCRLVQEGAQVAAMDLYEFKKCWKKFVDNGGRRFRPWKKLLTNFRYQDSKLQEILRPCYIPVPSSSSSTLSNICLTKGLPETRFCVERRRVHLLSEEEFYSQFYNQRVKHLCYYHGVKPYLCYQLEQFNGQAPLKGCLLSEKGKQHAEILFLDKIRSMELSQVIITCYLTWSPCPNCAWQLAAFKRDRPDLILHIYTSRLYFHWKRPFQKGLCSLWQSGILVDVMDLPQFTDCWTNFVNPKRPFWPWKGLEIISRRTQRRLHRIKESWGLQDLVNDFGNLQLGPPMS

SEQ ID NO: 496 - protein, 199 aa, Homo sapiens
MEASPASGPRHLMDPHIFTSNFNNGIGRHKTYLCYEVERLDNGTSVKMDQHRGFLHNQAKNLLCGFYGRHAELRFLDLVPSLQLDPAQIYRVTWFISWSPCFSWGCAGEVRAFLQENTHVRLRIFAARIYDYDPLYKEALQMLRDAGAQVSIMTYDEFKHCWDTFVDHQGCPFQPWDGLDEHSQALSGRLRAILQNQGN

SEQ ID NO: 497 - protein, 373 aa, Homo sapiens
MKPHFRNTVERMYRDTFSYNFYNRPILSRRNTVWLCYEVKTKGPSRPRLDAKIFRGQVYSQPEHHAEMCFLSWFCGNQLPAYKCFQITWFVSWTPCPDCVAKLAEFLAEHPNVTLTISAARLYYYWERDYRRALCRLSQAGARVKIMDDEEFAYCWENFVYSEGQPFMPWYKFDDNYAFLHRTLKEILRNPMEAMYPHIFYFHFKNLRKAYGRNESWLCFTMEVVKHHSPVSWKRGVFRNQVDPETHCHAERCFLSWFCDDILSPNTNYEVTWYTSWSPCPECAGEVAEFLARHSNVNLTIFTARLYYFWDTDYQEGLRSLSQEGASVEIMGYKDFKYCWENFVYNDDEPFKPWKGLKYNFLFLDSKLQEILE

SEQ ID NO: 498 - protein, 370 aa, Macaca mulatta
MVEPMDPRTFVSNFNNRPILSGLNTVWLCCEVKTKDPSGPPLDAKIFQGKVYSKAKYHPEMRFLRWFHKWRQLHHDQEYKVTWYVSWSPCTRCANSVATFLAKDPKVTLTIFVARLYYFWKPDYQQALRILCQKRGGPHATMKIMNYNEFQDCWNKFVDGRGKPFKPRNNLPKHYTLLQATLGELLRHLMDPGTFTSNFNNKPWVSGQHETYLCYKVERLHNDTWVPLNQHRGFLRNQAPNIHGFPKGRHAELCFLDLIPFWKLDGQQYRVTCFTSWSPCFSCAQEMAKFISNNEHVSLCIFAARIYDDQGRYQEGLRALHRDGAKIAMMNYSEFEYCWDTFVDRQGRPFQPWDGLDEHSQALSGRLRAI

SEQ ID NO: 499 - protein, 384 aa, Pan sp.
MKPHFRNPVERMYQDTFSDNFYNRPILSHRNTVWLCYEVKTKGPSRPPLDAKIFRGQVYSKLKYHPEMRFFHWFSKWRKLHRDQEYEVTWYISWSPCTKCTRDVATFLAEDPKVTLTIFVARLYYFWDPDYQEALRSLCQKRDGPRATMKIMNYDEFQHCWSKFVYSQRELFEPWNNLPKYYILLHIMLGEILRHSMDPPTFTSNFNNELWVRGRHETYLCYEVERLHNDTWVLLNQRRGFLCNQAPHKHGFLEGRHAELCFLDVIPFWKLDLHQDYRVTCFTSWSPCFSCAQEMAKFISNNKHVSLCIFAARIYDDQGRCQEGLRTLAKAGAKISIMTYSEFKHCWDTFVDHQGCPFQPWDGLEEHSQALSGRLRAILQNQGN

SEQ ID NO: 500 - protein, 377 aa, Chlorocebus sp.
MNPQIRNMVEQMEPDIFVYYFNNRPILSGRNTVWLCYEVKTKDPSGPPLDANIFQGKLYPEAKDHPEMKFLHWFRKWRQLHRDQEYEVTWYVSWSPCTRCANSVATFLAEDPKVTLTIFVARLYYFWKPDYQQALRILCQERGGPHATMKIMNYNEFQHCWNEFVDGQGKPFKPRKNLPKHYTLLHATLGELLRHVMDPGTFTSNFNNKPWVSGQRETYLCYKVERSHNDTWVLLNQHRGFLRNQAPDRHGFPKGRHAELCFLDLIPFWKLDDQQYRVTCFTSWSPCFSCAQKMAKFISNNKHVSLCIFAARIYDDQGRCQEGLRTLHRDGAKIAVMNYSEFEYCWDTFVDRQGRPFQPWDGLDEHSQALSGRLRAI

SEQ ID NO: 501 - protein, 384 aa, Homo sapiens
MKPHFRNTVERMYRDTFSYNFYNRPILSRRNTVWLCYEVKTKGPSRPPLDAKIFRGQVYSELKYHPEMRFFHWFSKWRKLHRDQEYEVTWYISWSPCTKCTRDMATFLAEDPKVTLTIFVARLYYFWDPDYQEALRSLCQKRDGPRATMKIMNYDEFQHCWSKFVYSQRELFEPWNNLPKYYILLHIMLGEILRHSMDPPTFTFNFNNEPWVRGRHETYLCYEVERMHNDTWVLLNQRRGFLCNQAPHKHGFLEGRHAELCFLDVIPFWKLDLDQDYRVTCFTSWSPCFSCAQEMAKFISKNKHVSLCIFTARIYDDQGRCQEGLRTLAEAGAKISIMTYSEFKHCWDTFVDHQGCPFQPWDGLDEHSQDLSGRLRAILQNQEN

SEQ ID NO: 502 - protein, 373 aa, Homo sapiens; identical to SEQ ID NO: 497

SEQ ID NO: 503 - protein, 382 aa, Homo sapiens
MNPQIRNPMERMYRDTFYDNFENEPILYGRSYTWLCYEVKIKRGRSNLLWDTGVFRGQVYFKPQYHAEMCFLSWFCGNQLPAYKCFQITWFVSWTPCPDCVAKLAEFLSEHPNVTLTISAARLYYYWERDYRRALCRLSQAGARVTIMDYEEFAYCWENFVYNEGQQFMPWYKFDENYAFLHRTLKEILRYLMDPDTFTFNFNNDPLVLRRRQTYLCYEVERLDNGTWVLMDQHMGFLCNEAKNLLCGFYGRHAELRFLDLVPSLQLDPAQIYRVTWFISWSPCFSWGCAGEVRAFLQENTHVRLRIFAARIYDYDPLYKEALQMLRDAGAQVSIMTYDEFEYCWDTFVYRQGCPFQPWDGLEEHSQALSGRLRAILQNQGN

SEQ ID NO: 504 - protein, 395 aa, Rattus sp.
MQPQGLGPNAGMGPVCLGCSHRRPYSPIRNPLKKLYQQTFYFHFKNVRYAWGRKNNFLCYEVNGMDCALPVPLRQGVFRKQGHIHAELCFIYWFHDKVLRVLSPMEEFKVTWYMSWSPCSKCAEQVARFLAAHRNLSLAIFSSRLYYYLRNPNYQQKLCRLIQEGVHVAAMDLPEFKKCWNKFVDNDGQPFRPWMRLRINFSFYDCKLQEIFSRMNLLREDVFYLQFNNSHRVKPVQNRYYRRKSYLCYQLERANGQEPLKGYLLYKKGEQHVEILFLEKMRSMELSQVRITCYLTWSPCPNCARQLAAFKKDHPDLILRIYTSRLYFWRKKFQKGLCTLWRSGIHVDVMDLPQFADCWTNFVNPQRPFRPWNELEKNSWRIQRRLRRIKESWGL

SEQ ID NO: 505 - protein, 227 aa, Bos sp.
MDGWEVAFRSGTVLKAGVLGVSMTEGWAGSGHPGQGACVWTPGTRNTMNLLREVLFKQQFGNQPRVPAPYYRRKTYLCYQLKQRNDLTLDRGCFRNKKQRHAERFIDKINSLDLNPSQSYKIICYITWSPCPNCANELVNFITRNNHLKLEIFASRLYFHWIKSFKMGLQDLQNAGISVAVMTHTEFEDCWEQFVDNQSRPFQPWDKLEQYSASIRRRLQRILTAPI

SEQ ID NO: 506 - protein, 490 aa, Pan sp.
MNPQIRNPMEWMYQRTFYYNFENEPILYGRSYTWLCYEVKIRRGHSNLLWDTGVFRGQMYSQPEHHAEMCFLSWFCGNQLSAYKCFQITWFVSWTPCPDCVAKLAKFLAEHPNVTLTISAARLYYYWERDYRRALCRLSQAGARVKIMDDEEFAYCWENFVYNEGQPFMPWYKFDDNYAFLHRTLKEIIRHLMDPDTFTFNFNNDPLVLRRHQTYLCYEVERLDNGTWVLMDQHMGFLCNEAKNLLCGFYGRHAELRFLDLVPSLQLDPAQIYRVTWFISWSPCFSWGCAGQVRAFLQENTHVRLRIFAARIYDYDPLYKEALQMLRDAGAQVSIMTYDEFEYCWDTFVYRQGCPFQPWDGLEEHSQALSGRLRAILQVRASSLCMVPHRPPPPPQSPGPCLPLCSEPPLGSLLPTGRPAPSLPFLLTASFSFPPPASLPPLPSLSLSPGHLPVPSFHSLTSCSIQPPCSSRIRETEGWASVSKEGRDLG

SEQ ID NO: 507 - protein, 190 aa, Homo sapiens
MNPQIRNPMKAMYPGTFYFQFKNLWEANDRNETWLCFTVEGIKRRSVVSWKTGVFRNQVDSETHCHAERCFLSWFCDDILSPNTKYQVTWYTSWSPCPDCAGEVAEFLARHSNVNLTIFTARLYYFQYPCYQEGLRSLSQEGVAVEIMDYEDFKYCWENFVYNDNEPFKPWKGLKTNFRLLKRRLRESLQ

SEQ ID NO: 508 - protein, 190 aa, Gorilla sp.
MNPQIRNPMKAMYPGTFYFQFKNLWEANDRNETWLCFTVEGIKRRSVVSWKTGVFRNQVDSETHCHAERCFLSWECDDILSPNTNYQVTWYTSWSPCPECAGEVAEFLARHSNVNLTIFTARLYYFQDTDYQEGLRSLSQEGVAVKIMDYKDFKYCWENFVYNDDEPFKPWKGLKYNFRFLKRRLQEILE

SEQ ID NO: 509 - protein, 199 aa, Homo sapiens; identical to SEQ ID NO: 496

SEQ ID NO: 510 - protein, 202 aa, Macaca mulatta
MDGSPASRPRHLMDPNTFTFNFNNDLSVRGRHQTYLCYEVERLDNGTWVPMDERRGFLCNKAKNVPCGDYGCHVELRFLCEVPSWQLDPAQTYRVTWFISWSPCFRRGCAGQVRVFLQENKHVRLRIFAARIYDYDPLYQEALRTLRDAGAQVSIMTYEEFKHCWDTFVDRQGRPFQPWDGLDEHSQALSGRLRAILQNQGN

SEQ ID NO: 511 - protein, 185 aa, Bos sp.
MDEYTFTENFNNQGWPSKTYLCYEMERLDGDATIPLDEYKGFVRNKGLDQPEKPCHAELYFLGKIHSWNLDRNQHYRLTCFISWSPCYDCAQKLTTFLKENHHISLHILASRIYTHNRFGCHQSGLCELQAAGARITIMTFEDFKHCWETFVDHKGKPFQPWEGLNVKSQALCTELQAILKTQQN

SEQ ID NO: 512 - protein, 200 aa, Homo sapiens
MALLTAETFRLQFNNKRRLRRPYYPRKALLCYQLTPQNGSTPTRGYFENKKKCHAEICFINEIKSMGLDETQCYQVTCYLTWSPCSSCAWELVDFIKAHDHLNLGIFASRLYYHWCKPQQKGLRLLCGSQVPVEVMGFPKFADCWENFVDHEKPLSFNPYKMLEELDKNSRAIKRRLERIKIPGVRAQGRYMDILCDAEV

SEQ ID NO: 513 - protein, 210 aa, Macaca mulatta
MALLTAKTFSLQFNNKRRVNKPYYPRKALLCYQLTPQNGSTPTRGHLKNKKKDHAEIRFINKIKSMGLDETQCYQVTCYLTWSPCPSCAGELVDFIKAHRHLNLRIFASRLYYHWRPNYQEGLLLLCGSQVPVEVMGLPEFTDCWENFVDHKEPPSFNPSEKLEELDKNSQAIKRRLERIKSRSVDVLENGLRSLQLGPVTPSSSIRNSR

SEQ ID NO: 514 - protein, 386 aa, Homo sapiens
MNPQIRNPMERMYRDTFYDNFENEPILYGRSYTWLCYEVKIKRGRSNLLWDTGVFRGPVLPKRQSNHRQEVYFRFENHAEMCFLSWFCGNRLPANRRFQITWFVSWNPCLPCVVKVTKFLAEHPNVTLTISAARLYYYRDRDWRWVLLRLHKAGARVKIMDYEDFAYCWENFVCNEGQPFMPWYKFDDNYASLHRTLKEILRNPMEAMYPHIFYFHFKNLLKACGRNESWLCFTMEVTKHHSAVFRKRGVFRNQVDPETHCHAERCFLSWFCDDILSPNTNYEVTWYTSWSPCPECAGEVAEFLARHSNVNLTIFTARLCYFWDTDYQEGLCSLSQEGASVKIMGYKDFVSCWKNFVYSDDEPFKPWKGLQTNFRLLKRRLREILQ

SEQ ID NO: 515 - protein, 236 aa, Homo sapiens
MTSEKGPSTGDPTLRRRIEPWEFDVFYDPRELRKEACLLYEIKWGMSRKIWRSSGKNTTNHVEVNFIKKFTSERDFHPSMSCSITWFLSWSPCWECSQAIREFLSRHPGVTLVIYVARLFWHMDQQNRQGLRDLVNSGVTIQIMRASEYYHCWRNFVNYPPGDEAHWPQYPPLWMMLYALELHCIILSLPPCLKISRRWQNHLTFFRLHLQNCHYQTIPPHILLATGLIHPSVAWR

SEQ ID NO: 516 - protein, 229 aa, Mus sp.
MSSETGPVAVDPTLRRRIEPHEFEVFFDPRELRKETCLLYEINWGGRHSVWRHTSQNTSNHVEVNFLEKFTTERYFRPNTRCSITWFLSWSPCGECSRAITEFLSRHPYVTLFIYIARLYHHTDQRNRQGLRDLISSGVTIQIMTEQEYCYCWRNFVNYPPSNEAYWPRYPHLWVKLYVLELYCIILGLPPCLKILRRKQPQLTFFTITLQTCHYQRIPPHLLWATGLK

SEQ ID NO: 517 - protein, 229 aa, Rattus sp. [sequence omitted]

SEQ ID NO: 518 - protein, 224 aa, Homo sapiens
MAQKEEAAVATEAASQNGEDLENLDDPEKLKELIELPPFEIVTGERLPANFFKFQFRNVEYSSGRNKTFLCYVVEAQGKGGQVQASRGYLEDEHAAAHAEEAFFNTILPAFDPALRYNVTWYVSSSPCAACADRIIKTLSKTKNLRLLILVGRLFMWEEPEIQAALKKLKEAGCKLRIMKPQDFEYVWQNFVEQEEGESKAFQPWEDIQENFLYYEEKLADILK

SEQ ID NO: 519 - protein, 224 aa, Mus sp.
MAQKEEAAEAAAPASQNGDDLENLEDPEKLKELIDLPPFEIVTGVRLPVNFFKFQFRNVEYSSGRNKTFLCYVVEVQSKGGQAQATQGYLEDEHAGAHAEEAFFNTILPAFDPALKYNVTWYVSSSPCAACADRILKTLSKTKNLRLLILVSRLFMWEEPEVQAALKKLKEAGCKLRIMKPQDFEYIWQNFVEQEEGESKAFEPWEDIQENFLYYEEKLADILK

SEQ ID NO: 520 - protein, 224 aa, Rattus sp.
MAQKEEAAEAAAPASQNGDDLENLEDPEKLKELIDLPPFEIVTGVRLPVNFFKFQFRNVEYSSGRNKTFLCYVVEAQSKGGQVQATQGYLEDEHAGAHAEEAFFNTILPAFDPALKYNVTWYVSSSPCAACADRILKTLSKTKNLRLLILVSRLFMWEEPEVQAALKKLKEAGCKLRIMKPQDFEYLWQNFVEQEEGESKAFEPWEDIQENFLYYEEKLADILK

SEQ ID NO: 521 - protein, 224 aa, Bos sp.; identical to SEQ ID NO: 492

SEQ ID NO: 522 - protein, 208 aa, Petromyzon marinus
MTDAEYVRIHEKLDIYTFKKQFFNNKKSVSHRCYVLFELKRRGERRACFWGYAVNKPQSGTERGIHAEIFSIRKVEEYLRDNPGQFTINWYSSWSPCADCAEKILEWYNQELRGNGHTLKIWACKLYYEKNARNQIGLWNLRDNGVGLNVMVSEHYQCCRKIFIQSSHNQLNENRWLEKTLKRAEKRRSELSFMIQVKILHTTKSPAV

SEQ ID NO: 523 - protein, 381 aa, Homo sapiens
MKPHFRNTVERMYRDTFSYNFYNRPILSRRNTVWLCYEVKTKGPSRPPLDAKIFRGQVYSELKYHPEMRFFHWFSKWRKLHRDQEYEVTWYISWSPCTKCTRDMATFLAEDPKVTLTIFVARLYYFWDPDYQEALRSLCQKRDGPRATMKFNYDEFQHCWSKFVYSQRELFEPWNNLPKYYILLHFMLGEILRHSMDPPTFTFNFNNEPWVRGRHETYLCYEVERMHNDTWVLLNQRRGFLCNQAPHKHGFLEGRHAELCFLDVIPFWKLDLDQDYRVTCFTSWSPCFSCAQEMAKFISKKHVSLCIFTARIYRRQGRCQEGLRTLAEAGAKISFTYSEFKHCWDTFVDHQGCPFQPWDGLDEHSQDLSGRLRAILQNQEN

SEQ ID NO: 524 - protein, 182 aa, Homo sapiens
MDPPTFTFNFNNEPWWGRHETYLCYEVERMHNDTWVLLNQRRGFLCNQAPHKHGFLEGRHAELCFLDVIPFWKLDLDQDYRVTCFTSWSPCFSCAQEMAKFISKNKHVSLCIFTARIYDDQGRCQEGLRTLAEAGAKISFTYSEFKHCWDTFVDHQGCPFQPWDGLDEHSQDLSGRLRAILQ

SEQ ID NO: 525 - protein, 184 aa, Homo sapiens
MDPPTFTFNFNNEPWVRGRHETYLCYEVERMHNDTWVLLNQRRGFLCNQAPHKHGFLEGRHAELCFLDVIPFWKLDLDQDYRVTCFTSWSPCFSCAQEMAKFISKNKHVSLCIFTARIYRRQGRCQEGLRTLAEAGAKISFMTYSEFKHCWDTFVDHQGCPFQPWDGLDEHSQDLSGRLRAILQ

SEQ ID NO: 526 - protein, 367 aa, Homo sapiens
MEPIYEEYLANHGTIVKPYYWLSFSLDCSNCPYHIRTGEEARVSLTEFCQIFGFPYGTTFPQTKHLTFYELKTSSGSLVQKGHASSCTGNYIHPESMLFEMNGYLDSAIYNNDSIRHIILYSNNSPCNEANHCCISKMYNFLITYPGITLSIYFSQLYHTEMDFPASAWNREALRSLASLWPRVVLSPISGGIWHSVLHSFISGVSGSHVFQPILTGRALADRHNAYEINAITGVKPYFTDVLLQTKRNPNTKAQEALESYPLNNAFPGQFFQMPSGQLQPNLPPDLRAPVVFVLVPLRDLPPMHMGQNPNKPRNIVRHLNMPQMSFQETKDLGRLPTGRSVEIVEITEQFASSKEADEKKKKKGKK

SEQ ID NO: 527 - protein, 198 aa, Mus musculus; identical to SEQ ID NO: 479

SEQ ID NO: 528 - protein, 388 aa, Rattus norvegicus
MEPLYEEYLTHSGTIVKPYYWLSVSLNCTNCPYHIRTGEEARVPYTEFHQTFGFPWSTYPQTKHLTFYELRSSSGNLIQKGLASNCTGSHTHPESMLFERDGYLDSLIFHDSNIRHIILYSNNSPCDEANHCCISKMYNFLMNYPEVTLSVFFSQLYHTENQFPTSAWNREALRGLASLWPQVTLSAISGGIWQSILETFVSGISEGLTAVRPFTAGRTLTDRYNAYEINCITEVKPYFTDALHSWQKENQDQKVWAASENQPLHNTTPAQWQPDMSQDCRTPAVFMLVPYRDLPPIHVNPSPQKPRTVVRHLNTLQLSASKVKALRKSPSGRPVKKEEARKGSTRSQEANETNKSKWKKQTLFIKSNICHLLEREQKKIGILSSWSV

SEQ ID NO: 529 - protein, 363 aa, Macaca fascicularis
MEPTYEEYLANHGTIVKPYYWLSFSLDCSNCPYHIRTGEEARVSLTEFCQIFGFPYGTTYPQTKHLTFYELKTSSGSLVQKGHASSCTGNYIHPESMLFEMNGYLDSAIYNNDSIRHIILYCNNSPCNEANHCCISKVYNFLITYPGITLSIYFSQLYHTEMDFPASAWNREALRSLASLWPRVVLSPISGGIWHSVLHSFVSGVSGSHVFQPILTGRALTDRYNAYEINAITGVKPFFTDVLLHTKRNPNTKAQMALESYPLNNAFPGQSFQMTSGIPPDLRAPVVFVLLPLRDLPPMHMGQDPNKPRNIIRHLNMPQMSFQETKDLERLPTRRSVETVEITERFASSKQAEEKTKKKKGKK

SEQ ID NO: 530 - protein, 224 aa, Petromyzon marinus
MAGYECVRVSEKLDFDTFEFQFENLHYATERHRTYVIFDVKPQSAGGRSRRLWGYIINNPNVCHAELILMSMIDRHLESNPGVYAMTWYMSWSPCANCSSKLNPWLKNLLEEQGHTLTMHFSRIYDRDREGDHRGLRGLKHVSNSFRMGVVGRAEVKECLAEYVEASRRTLTWLDTTESMAAKMRRKLFCILVRCAGMRESGIPLHLFTLQTPLLSGRVVWWRV

SEQ ID NO: 531 - protein, 331 aa, Petromyzon marinus
MELREVVDCALASCVRHEPLSRVAFLRCFAAPSQKPRGTVILFYVEGAGRGVTGGHAVNYNKQGTSIHAEVLLLSAVRAALLRRRRCEDGEEATRGCTLHCYSTYSPCRDCVEYIQEFGASTGVRVVIHCCRLYELDVNRRRSEAEGVLRSLSRLGRDFRLMGPRDAIALLLGGRLANTADGESGASGNAWVTETNVVEPLVDMTGFGDEDLHAQVQRNKQIREAYANYASAVSLMLGELHVDPDKFPFLAEFLAQTSVEPSGTPRETRGRPRGASSRGPEIGRQRPADFERALGAYGLFLHPRIVSREADREEIKRDLIVVMRKHNYQGP

SEQ ID NO: 532 - protein, 209 aa, Petromyzon marinus
MAGDENVRVSEKLDFDTFEFQFENLHYATERHRTYVIFDVKPQSAGGRSRRLWGYIINNPNVCHAELILMSMIDRHLESNPGVYAMTWYMSWSPCANCSSKLNPWLKNLLEEQGHTLMMHFSRIYDRDREGDHRGLRGLKHVSNSFRMGVVGRAEVKECLAEYVEASRRTLTWLDTTESMAAKMRRKLFCILVRCAGMRESGMPLHLFT

SEQ ID NO: 533 - protein, 158 aa, Saccharomyces cerevisiae
MVTGGMASKWDQKGMDIAYEEAALGYKEGGVPIGGCLINNKDGSVLGRGHNMRFQKGSATLHGEISTLENCGRLEGKVYKDTTLYTTLSPCDMCTGAIIMYGIPRCVVGENVNFKSKGEKYLQTRGHEVVVVDDERCKKIMKQFIDERPQDWFEDIGE

SEQ ID NO: 534 - protein, 218 aa, Rattus sp.
MSSETGPVAVDPTLRRRIEPHEFEVFFDPRELRKETCLLYEINWGGRHSIWRHTSQNTNKHVEVNFIEKFTTERYFCPNTRCSITWFLSWSPCGECSRAITEFLSRYPHVTLFIYIARLYHHADPRNRQGLRDLISSGVTIQIMTEQESGYCWRNFVNYSPSNEAHWPRYPHLWVRGLPPCLNILRRKQPQLTFFTIALQSCHYQRLPPHILWATGLK

SEQ ID NO: 535 - protein, 218 aa, Rattus sp.
MSSETGPVAVDPTLRRRIEPHEFEVFFDPRELRKETCLLYEINWGGRHSIWRHTSQNTNKHVEVNFIEKFTTERYFCPNTRCSITWFLSWSPCGECSRAITEFLSRYPHVTLFIYIARLYHHADPRNRQGLRDLISSGVTIQIMTEQESGYCWRNFVNYSPSNEAHWPRYPHLWVRLYVLELYCIILGLPPCLNILRRKQPQHYQRLPPHILWATGLK

SEQ ID NO: 536 - protein, 429 aa, Mus sp.; identical to SEQ ID NO: 494

SEQ ID NO: 537 - skipped

SEQ ID NO: 538 - protein, 4 aa, synthetic construct
GGGG

SEQ ID NO: 539 - protein, 5 aa, synthetic construct
GGGGG

SEQ ID NO: 540 - protein, 6 aa, synthetic construct
GGGGGG

SEQ ID NO: 541 - protein, 7 aa, synthetic construct
GGGGGGG

SEQ ID NO: 542 - protein, 8 aa, synthetic construct
GGGGGGGG

SEQ ID NO: 543 - skipped

SEQ ID NO: 544 - protein, 6 aa, synthetic construct
GSSGSS

SEQ ID NO: 545 - protein, 9 aa, synthetic construct
GSSGSSGSS

SEQ ID NO: 546 - protein, 12 aa, synthetic construct
GSSGSSGSSGSS

SEQ ID NO: 547 - protein, 15 aa, synthetic construct
GSSGSSGSSGSSGSS

SEQ ID NO: 548 - protein, 18 aa, synthetic construct
GSSGSSGSSGSSGSSGSS

SEQ ID NO: 549 - skipped

SEQ ID NO: 550 - protein, 6 aa, synthetic construct
GGSGGS

SEQ ID NO: 551 - protein, 9 aa, synthetic construct
GGSGGSGGS

SEQ ID NO: 552 - protein, 12 aa, synthetic construct
GGSGGSGGSGGS

SEQ ID NO: 553 - protein, 15 aa, synthetic construct
GGSGGSGGSGGSGGS

SEQ ID NO: 554 - protein, 18 aa, synthetic construct
GGSGGSGGSGGSGGSGGS

SEQ ID NO: 555 - protein, 5 aa, synthetic construct
GGGGS

SEQ ID NO: 556 - protein, 10 aa, synthetic construct
GGGGSGGGGS

SEQ ID NO: 557 - protein, 15 aa, synthetic construct
GGGGSGGGGSGGGGS

SEQ ID NO: 558 - protein, 25 aa, synthetic construct
GGGGSGGGGSGGGGSGGGGSGGGGS

SEQ ID NO: 559 - protein, 30 aa, synthetic construct
GGGGSGGGGSGGGGSGGGGSGGGGSGGGGS

SEQ ID NO: 560 - protein, 6 aa, synthetic construct
GGSGGG

SEQ ID NO: 561 - protein, 6 aa, synthetic construct
GGGGGS

SEQ ID NO: 562 - protein, 6 aa, synthetic construct
GGSGSS

SEQ ID NO: 563 - protein, 6 aa, synthetic construct
GSSGGS

SEQ ID NO: 564 - skipped

SEQ ID NO: 565 - protein, 6 aa, synthetic construct
GSSGSS

SEQ ID NO: 566 - protein, 9 aa, synthetic construct
GSSGSSGSS

SEQ ID NO: 567 - protein, 12 aa, synthetic construct
GSSGSSGSSGSS

SEQ ID NO: 568 - protein, 15 aa, synthetic construct
GSSGSSGSSGSSGSS

SEQ ID NO: 569 - protein, 18 aa, synthetic construct
GSSGSSGSSGSSGSSGSS

SEQ ID NO: 570 - protein, 6 aa, synthetic construct
GGGGSS

SEQ ID NO: 571 - protein, 9 aa, synthetic construct
GGSGGGGSS

SEQ ID NO: 572 - protein, 9 aa, synthetic construct
GGSGSSGGG

SEQ ID NO: 573 - protein, 9 aa, synthetic construct
GGGGGSGSS

SEQ ID NO: 574 - protein, 9 aa, synthetic construct
GGGGSSGGS

SEQ ID NO: 575 - protein, 9 aa, synthetic construct
GSSGGSGGG

SEQ ID NO: 576 - protein, 9 aa, synthetic construct
GSSGGGGGS

SEQ ID NO: 577 - protein, 5 aa, synthetic construct
EAAAK

SEQ ID NO: 578 - protein, 10 aa, synthetic construct
EAAAKEAAAK

SEQ ID NO: 579 - protein, 15 aa, synthetic construct
EAAAKEAAAKEAAAK

SEQ ID NO: 580 - protein, 20 aa, synthetic construct
EAAAKEAAAKEAAAKEAAAK

SEQ ID NO: 581 - protein, 25 aa, synthetic construct
EAAAKEAAAKEAAAKEAAAKEAAAK

SEQ ID NO: 582 - protein, 30 aa, synthetic construct
EAAAKEAAAKEAAAKEAAAKEAAAKEAAAK

SEQ ID NO: 583 - protein, 11 aa, synthetic construct
GGSGGGEAAAK

SEQ ID NO: 584 - protein, 11 aa, synthetic construct
GGSEAAAKGGG

SEQ ID NO: 585 - protein, 11 aa, synthetic construct
GGGGGSEAAAK

SEQ ID NO: 586 - protein, 11 aa, synthetic construct
GGGEAAAKGGS

SEQ ID NO: 587 - protein, 11 aa, synthetic construct
EAAAKGGSGGG

SEQ ID NO: 588 - protein, 11 aa, synthetic construct
EAAAKGGGGGS

SEQ ID NO: 589 - skipped

SEQ ID NO: 590 - protein, 5 aa, synthetic construct
PAPAP

SEQ ID NO: 591 - protein, 7 aa, synthetic construct
PAPAPAP

SEQ ID NO: 592 - protein, 9 aa, synthetic construct
PAPAPAPAP

SEQ ID NO: 593 - protein, 11 aa, synthetic construct
PAPAPAPAPAP

SEQ ID NO: 594 - protein, 13 aa, synthetic construct
PAPAPAPAPAPAP

SEQ ID NO: 595 - protein, 6 aa, synthetic construct
GGGPAP

SEQ ID NO: 596 - protein, 6 aa, synthetic construct
PAPGSS

SEQ ID NO: 597 - protein, 9 aa, synthetic construct
GGSGGGPAP

SEQ ID NO: 598 - protein, 9 aa, synthetic construct
GGSPAPGGG

SEQ ID NO: 599 - protein, 9 aa, synthetic construct
GGGGGSPAP

SEQ ID NO: 600 - protein, 9 aa, synthetic construct
GGGPAPGGS

SEQ ID NO: 601 - protein, 9 aa, synthetic construct
PAPGGSGGG

SEQ ID NO: 602 - protein, 9 aa, synthetic construct
PAPGGGGGS

SEQ ID NO: 603 - protein, 9 aa, synthetic construct
GGSGSSPAP

SEQ ID NO: 604 - protein, 9 aa, synthetic construct
GGSPAPGSS

SEQ ID NO: 605 - protein, 9 aa, synthetic construct
GSSGGSPAP

SEQ ID NO: 606 - protein, 9 aa, synthetic construct
GSSPAPGGS

SEQ ID NO: 607 - protein, 9 aa, synthetic construct
PAPGGSGSS

SEQ ID NO: 608 - protein, 9 aa, synthetic construct
PAPGSSGGS

SEQ ID NO: 609 - protein, 9 aa, synthetic construct
GGGGSSPAP

SEQ ID NO: 610 - protein, 9 aa, synthetic construct
GGGPAPGSS

SEQ ID NO: 611 - protein, 9 aa, synthetic construct
GSSGGGPAP

SEQ ID NO: 612 - protein, 9 aa, synthetic construct
GSSPAPGGG

SEQ ID NO: 613 - protein, 9 aa, synthetic construct
PAPGGGGSS

SEQ ID NO: 614 - protein, 9 aa, synthetic construct
PAPGSSGGG

SEQ ID NO: 615 - protein, 8 aa, synthetic construct
GGSEAAAK

SEQ ID NO: 616 - protein, 6 aa, synthetic construct
PAPGGS

SEQ ID NO: 617 - protein, 8 aa, synthetic construct
GGGEAAAK

SEQ ID NO: 618 - protein, 8 aa, synthetic construct
EAAAKGGG

SEQ ID NO: 619 - protein, 8 aa, synthetic construct
GSSEAAAK

SEQ ID NO: 620 - protein, 8 aa, synthetic construct
EAAAKGSS

SEQ ID NO: 621 - protein, 8 aa, synthetic construct
EAAAKPAP

SEQ ID NO: 622 - protein, 8 aa, synthetic construct
PAPEAAAK

SEQ ID NO: 623 - protein, 11 aa, synthetic construct
GGSGSSEAAAK

SEQ ID NO: 624 - protein, 11 aa, synthetic construct
GGSEAAAKGSS

SEQ ID NO: 625 - protein, 11 aa, synthetic construct
GSSGGSEAAAK

SEQ ID NO: 626 - protein, 11 aa, synthetic construct
GSSEAAAKGGS

SEQ ID NO: 627 - protein, 11 aa, synthetic construct
EAAAKGGSGSS

SEQ ID NO: 628 - protein, 11 aa, synthetic construct
EAAAKGSSGGS

SEQ ID NO: 629 - protein, 11 aa, synthetic construct
GGSEAAAKPAP

SEQ ID NO: 630 - protein, 11 aa, synthetic construct
GGSPAPEAAAK

SEQ ID NO: 631 - protein, 11 aa, synthetic construct
EAAAKGGSPAP

SEQ ID NO: 632 - protein, 11 aa, synthetic construct
EAAAKPAPGGS

SEQ ID NO: 633 - protein, 11 aa, synthetic construct
PAPGGSEAAAK

SEQ ID NO: 634 - protein, 11 aa, synthetic construct
PAPEAAAKGGS

SEQ ID NO: 635 - protein, 11 aa, synthetic construct
GGGGSSEAAAK

SEQ ID NO: 636 - protein, 11 aa, synthetic construct
GGGEAAAKGSS

SEQ ID NO: 637 - protein, 11 aa, synthetic construct
GSSGGGEAAAK

SEQ ID NO: 638 - protein, 11 aa, synthetic construct
GSSEAAAKGGG

SEQ ID NO: 639 - protein, 11 aa, synthetic construct
EAAAKGGGGSS

SEQ ID NO: 640 - protein, 11 aa, synthetic construct
EAAAKGSSGGG

SEQ ID NO: 641 - protein, 11 aa, synthetic construct
GGGEAAAKPAP

SEQ ID NO: 642 - protein, 11 aa, synthetic construct
GGGPAPEAAAK

SEQ ID NO: 643 - protein, 11 aa, synthetic construct
EAAAKGGGPAP

SEQ ID NO: 644 - protein, 11 aa, synthetic construct
EAAAKPAPGGG

SEQ ID NO: 645 - protein, 11 aa, synthetic construct
PAPGGGEAAAK

SEQ ID NO: 646 - protein, 11 aa, synthetic construct
PAPEAAAKGGG

SEQ ID NO: 647 - protein, 11 aa, synthetic construct
GSSEAAAKPAP

SEQ ID NO: 648 - protein, 11 aa, synthetic construct
GSSPAPEAAAK

SEQ ID NO: 649 - protein, 11 aa, synthetic construct
EAAAKGSSPAP

SEQ ID NO: 650 - protein, 11 aa, synthetic construct
EAAAKPAPGSS

SEQ ID NO: 651 - protein, 11 aa, synthetic construct
PAPGSSEAAAK

SEQ ID NO: 652 - protein, 11 aa, synthetic construct
PAPEAAAKGSS

SEQ ID NO: 653 - protein, 15 aa, synthetic construct
GGGGSEAAAKGGGGS

SEQ ID NO: 654 - protein, 15 aa, synthetic construct
EAAAKGGGGSEAAAK

SEQ ID NO: 655 - protein, 16 aa, synthetic construct
SGSETPGTSESATPES

SEQ ID NO: 656 - protein, 12 aa, synthetic construct
GSAGSAAGSGEF

SEQ ID NO: 657 - protein, 33 aa, synthetic construct
SGGSSGGSSGSETPGTSESATPESSGGSSGGSS

SEQ ID NO: 658 - protein, 46 aa, synthetic construct
AEAAAKEAAAKEAAAKEAAAKALEAEAAAKEAAAKEAAAKEAAAKA

SEQ ID NO: 659 - DNA, 126 bp, synthetic construct
  source 1..126: mol_type = other DNA
catggtgcacctgactcctggttttagagctagaaatagcaagttaaaataaggctagtccgttatcaacttgaaaaagtggcaccgagtcggtgcacggcagacttctctgccggagtcaggtgc

SEQ ID NO: 660 - DNA, 96 bp, synthetic construct
  source 1..96: mol_type = other DNA
cacgttcaccttgccccacagttttagagctagaaatagcaagttaaaataaggctagtccgttatcaacttgaaaaagtggcaccgagtcggtgc

1. A Cas endonuclease (or a functional fragment, functional variant, or domain thereof) that comprises an amino acid sequence is at least 80%, 81%, 82% 83%, 84%, 85%, 86%, 87%, 88%, 89%, 90%, 91%, 92%, 93%, 94%, 95%, 96%, 97%, 98%, 99%, or 100% identical to the amino acid sequence of any Cas endonuclease set forth in Table 1 or set forth in any one of SEQ ID NOS: 1-320.

2.-6. (canceled)

7. The Cas endonuclease of claim 1, having one or more and/or the following properties (or engineered to have one or more of the following properties):
(a) the ability to mediate double strand breaks in a target double stranded nucleic acid molecule;
(b) the ability to mediate single strand breaks in a target double stranded nucleic acid molecule;
(c) the inability to mediate double strand breaks in a target double stranded nucleic acid molecule;
(d) the ability to mediate single strand breaks in a target double stranded nucleic acid molecule and the inability to mediate double strand breaks in a target double stranded nucleic acid molecule;
(f) DNA endonuclease activity; and/or
(g) RNA guided DNA endonuclease activity.

8.-20. (canceled)

21. A conjugate comprising the Cas endonuclease of claim 1 and one or more heterologous moieties.

22.-26. (canceled)

27. A fusion protein comprising the Cas endonuclease of claim 1 and one or more heterologous protein.

28.-31. (canceled)

32. The fusion protein of claim 27, wherein the heterologous protein exhibits polymerase activity, nucleobase editing activity, methylase activity, demethylase activity, transcription activation activity, transcription repression activity, transcription release factor activity, histone modification activity, nuclease activity, single-strand RNA cleavage activity, double-strand RNA cleavage activity, single-strand DNA cleavage activity, or double-strand DNA cleavage activity and nucleic acid binding activity, or any combination of the foregoing.

33.-42. (canceled)

43. A nucleic acid molecule encoding the Cas endonuclease of claim 1.

44.-47. (canceled)

48. A vector comprising the nucleic acid molecule of claim 43.

49.-50. (canceled)

51. A carrier comprising the Cas endonuclease of claim 1 (or a nucleic acid molecule encoding the same).

52.-56. (canceled)

57. A reaction mixture comprising (a) a cell or a target nucleic acid molecule; and (b) the Cas endonuclease of claim 1 (or a nucleic acid molecule encoding the same).

58. A cell comprising the Cas endonuclease of claim 1 (or a nucleic acid molecule encoding the same).

59. A pharmaceutical composition comprising the Cas endonuclease of claim 1 (or a nucleic acid molecule encoding the same), and a pharmaceutically acceptable excipient.

60. A kit comprising the Cas endonuclease of claim 1 (or a nucleic acid molecule encoding the same); and optionally instructions for using any one or more of the foregoing.

61. A system for modifying a target nucleic acid molecule, comprising:
(a) the Cas endonuclease of claim 1 (or a nucleic acid molecule encoding the same), and
(b) a first gRNA or a nucleic acid molecule encoding the first gRNA.

62.-93. (canceled)

94. A system for modifying a dsDNA molecule, comprising:
(a) the fusion protein of claim 33 or a nucleic acid molecule encoding the fusion protein; and
(b) a template RNA that comprises a crRNA, a tracrRNA, a heterologous object sequence, and a 3′ target homology domain; or a nucleic acid molecule encoding the template RNA.

95. A nucleic acid molecule encoding the system of claim 61.

96.-98. (canceled)

99. A vector comprising the nucleic acid molecule of claim 95.

100.-101. (canceled)

102. A carrier comprising the system of claim 61.

103.-108. (canceled)

109. A reaction mixture comprising (a) a cell (e.g., comprising a target nucleic acid molecule) or a target nucleic acid molecule; and (b) the system of claim 61.

110. A cell comprising the system of claim 61.

111. A pharmaceutical composition comprising the system of claim 61, and a pharmaceutically acceptable excipient.

112. A kit comprising the system of claim 61; and optionally instructions for using any one or more of the foregoing.

113. A method of delivering a Cas endonuclease to a cell, the method comprising, introducing into a cell the Cas endonuclease of claim 1 (or a nucleic acid molecule encoding the same), to thereby deliver the Cas endonuclease to the cell.

114.-118. (canceled)

119. A method of cleaving a target site in a target nucleic acid molecule, the method comprising contacting the cell with the Cas endonuclease of claim 1 (or a nucleic acid molecule encoding the same), to thereby cleave the target site in the target nucleic acid (e.g., DNA) molecule.

120. A method of editing a target site in a target nucleic acid molecule, the method comprising contacting the cell with the Cas endonuclease of claim 1 (or a nucleic acid molecule encoding the same), to thereby edit the target site in the target nucleic acid molecule.

121. A method of editing a target site in genomic dsDNA in a cell, the method comprising, contacting the Cas endonuclease of claim 1 (or a nucleic acid molecule encoding the same), to thereby edit the target site in the genomic DNA of the cell.

122. A method of editing a target site in a dsDNA molecule, the method comprising: contacting a dsDNA molecule with
(a) the fusion protein of claim 33 (or a nucleic acid molecule encoding the fusion protein, and
(b) a template RNA that comprises a crRNA, a tracrRNA, a heterologous object sequence, and a 3′ target homology domain, to thereby modify the target site in the dsDNA molecule (or a nucleic acid molecule encoding the template RNA), to thereby edit the target site in the dsDNA molecule.

123.-130. (canceled)

131. A method of treating ameliorating, or preventing a disease in a subject in need thereof, the method comprising administering to the subject the Cas endonuclease of claim 1 (or a nucleic acid molecule encoding the same), to thereby treat, ameliorate, or prevent the disease in the subject.

132.-143. (canceled)
